(19) United States
(12) Patent Application Publication
(10) Pub. No.: US 2005/0095592 A1
(43) Pub. Date: May 5, 2005

(54) Identification of ovarian cancer tumor markers and therapeutic targets

(76) Inventors: Amir A Jazaeri, Charlottsville, VA (US); Jeffrey Boyd, Dobbs Ferry, NY (US); Edison T Liu, Cuscaden Walk (SG)

Correspondence Address: KLARQUIST SPARKMAN, LLP, 121 S.W. SALMON STREET, SUITE #1600, ONE WORLD TRADE CENTER, PORTLAND, OR, 97204-2988, US

(21) Appl. No.: 10/505,680

(22) PCT Filed: Feb. 13, 2003
(86) PCT No.: PCT/US03/04688

Related U.S. Application Data
(60) Provisional application No. 60/357,031, filed on Feb. 13, 2002.

(51) Int. Cl. C12Q 1/68; G01N 33/574

(52) U.S. Cl. 435/6; 435/7.23

(57) ABSTRACT

The present disclosure provides methods for classifying ovarian tumors into BRCA1-type, BRCA2-type or non-BRCA-type tumor types by measuring expression levels of a plurality of disclosed ovarian tumor markers. The markers disclosed herein are useful in the diagnosis, staging, detection, and/or treatment of ovarian cancer. Also provided are methods of selecting a treatment regimen by selecting the tumor type. Ovarian cancer-linked logarithmic expression ratios and kits for diagnosis, staging, and detection of ovarian cancer using are also provided.

### PRIORITY CLAIM

[0001] This application claims the benefit of U.S. Provisional Application No. 60/357,031, filed Feb. 13, 2002, which is incorporated by reference in its entirety herein.

### FIELD OF THE DISCLOSURE

[0002] The present disclosure is related to diagnosing, prognosing, staging, preventing, and treating disease, particularly ovarian cancer.

### BACKGROUND

[0003] Ovarian cancer has one of the highest mortality rates of all cancers, due in part to the difficulty of diagnosis. Currently, epithelial ovarian cancer is the leading cause of death resulting from gynecological cancer (see Welsh et al., PNAS 98: 1176-1181, 2001). Studies indicate that the five-year survival rates for ovarian cancer are as follows: Stage 1(93%), Stage 11(70%), Stage III (37%), and Stage IV (25%) (see Holschneider & Berek, Sermin. Surg. Oncol. 19: 3-10, 2000). Thus, there is a particular need for improved methods of early diagnosis, prognosis, and monitoring of ovarian cancer.

[0004] Protein and mRNA levels, and changes in these levels, may be associated with specific types of cancer (and cancer progression). Such association is often specific to the type of cancer, meaning that what is overexpressed in one cancer may be under-expressed (or unchanged) in another. Thus, a collection or set of genes/proteins that are differentially regulated in a specific cancer may be indicative and specifically diagnostic of that type of cancer.

[0005] Molecular mechanisms involved in the onset and progression of ovarian cancer remain poorly understood. However, some mutations causing ovarian cancer have been identified. Between 5% and 10% of all breast cancers are hereditary. The remaining 90% to 95% are classified as “sporadic,” for which no genetic link to development has been identified.

[0006] Breast cancer susceptibility genes BRCA1 (GenBank Accession #U14680) and BRCA2 (GenBank Accession #U43746) are tumor suppressor genes. Germ-line mutations of BRCA1 and BRCA2 are responsible for approximately 5-10% of all epithelial ovarian cancers (see Li and Karlan, Curr. Oncol. Rep. 3:27-32, 2001). Of inherited breast cancers, it is believed that inherited mutations in BRCA1 or BRCA2 are responsible as many as 70% of all cases.

[0007] Those with inherited mutations in BRCA1 and BRCA2 have an approximately 63% lifetime risk of developing breast cancer, whereas the general female population has a 12% lifetime risk. The BRCA1 and BRCA2 gene mutations are more often identified in breast cancer patients with poor prognostic factors, which are risk factors that predict for poorer treatment outcomes (e.g., estrogen-receptor-negative tumors, higher growth rates, age less than 35 at onset of disease, breast cancer in both breasts). Development of disease in the opposite breast and ovarian cancer also appear to be more common in breast cancer patients with BRCA1 or BRCA2 mutations. Hence, the presence of BRCA1 or BRCA2 mutations may indicate a need for more aggressive therapeutic treatments.

[0008] The alleles of BRCA1 and BRCA2 must be inactivated before tumor development occurs. BRCA1 and BRCA2 are believed to take part in a common pathway involved in maintenance of genomic integrity in cells; however, little is known about the specific molecular mechanisms involved in BRCA mutation associated (BRCA-linked) ovarian carcinogenesis. For example, it is not known whether BRCA1 and BRCA2 mutations affect common or unique molecular pathways in ovarian cancer, or if these pathways overlap with those involved in the formation of sporadic tumors. Both BRCA proteins have been implicated in important cellular functions, including embryonic development, DNA damage repair, and transcriptional regulation (see Scully and Livingston, Nature 408:429-432, 2000; Zheng et al., Oncogene 19:6159-6175, 2000; Welcsh et al., Trends. Genet. 16:69-74, 2000; and MacLachlan et al., J. Biol. Chem. 275:2777-2785, 2000). BRCA1 and BRCA2 have each been implicated in defective homologous recombination DNA repair (see Arvanitis et al., International Journal of Molecular Medicine 10:55-63, 2002), and it is believed that each may be a positive regulator of homologous recombination, with BRCA2 potentially interacting with Rad51, a central homologous recombination effector protein, and BRCA1 regulating GADD45, a DNA damage response gene.

[0009] Patients having cervical and endometrial cancer resulting in defects in homologous recombination pathways have been shown to respond favorably to radiotherapy (Arvantis et al.). Therefore, patients having ovarian cancer resulting from a defect in BRCA1 or BRCA2 may similarly benefit from radiotherapy treatment. Hence, the ability to classify ovarian cancer patients into groups based upon the underlying mutation provides advantages in selecting potential courses of treatment, and in deciding whether to pursue a more aggressive course of treatment.

[0010] In sum, there is a need to better understand patterns of gene expression that trigger ovarian cancer, as well as downstream genes that may serve as indicators of ovarian cancer progression or as potential tumor suppressors.

### BRIEF SUMMARY OF THE DISCLOSURE

[0011] The present disclosure concerns a method of classifying an ovarian tumor as a BRCA1-like or BRCA2-like or non-BRCA-type tumor, by determining a pattern of expression in the ovarian tumor of a plurality of markers listed in Table 1, wherein the pattern of expression in the ovarian tumor is determined relative to a standard ovarian tissue. The pattern of expression of the markers in the ovarian tumor is then compared to the pattern of expression of the same markers in tissue from a known BRCA1-like or BRCA2-like or non-BRCA-type tumor. A similarity of the pattern of expression in the ovarian tumor to a pattern of expression of the comparison tissue of the known BRCA1-like tumor classifies the ovarian tumor as a BRCA1-like tumor; a similarity of the pattern of expression in the ovarian tumor to a pattern of expression of the known BRCA2-like tumor classifies the ovarian tumor as a BRCA2-like tumor; and a similarity of the pattern of expression in the ovarian tumor to a pattern of expression of the known sporadic tumor classifies the ovarian tumor as a sporadic tumor.

[0012] The patterns of expression are determined, for example, by determining a pattern of over-expression or under-expression of the plurality of markers in the ovarian tumor to over-expression or under-expression of the plurality of markers of the comparison tissue. Alternatively, a pattern of both over-expression and under-expression of the plurality of markers in the ovarian tumor is compared to over-expression and under-expression of the plurality of markers in the comparison tissue.

[0013] It has also been discovered that ovarian tumors that do not contain a BRCA1 or BRCA2 mutation may be BRCA-1-like or BRCA2-like in that the pattern of expression of the markers is similar to a tumor having a BRCA-1 or BRCA-2 mutation. Hence tumors that would otherwise be considered “non-BRCA-type” can be classified as BRCA-1-like or BRCA-2-like, which can contribute to decisions about treatment and prognosis even in the absence of the mutation.

[0014] Standard ovarian tissue serves as a baseline from which patterns of over expression and under expression can be determined. The “standard” ovarian tissue may be, for example, from an immortalized ovarian cell, ovarian tissue from a subject not having ovarian cancer, a subject not predisposed to developing ovarian cancer, or ovarian tissue from a subject from whom the ovarian tumor was obtained at an earlier point in time. It is also possible for the standard tissue to be tumor tissue taken from a patient at an earlier point in time, for example prior to treatment (for example prior to the administration of chemotherapy). However in most instances the “standard” tissue is “normal” non-tumor ovarian tissue, such as an immortalized ovarian cell line, for example an IOSE cell line.

[0015] Many different approaches are described in this disclosure for determining the patterns of expression, and assessing similarities. In specific examples, the patterns of expression are patterns of logarithmic expression ratios, hierarchical clustering patterns, or multidimensional scaling patterns. The patterns may be compared visually or statistically to arrive at conclusions regarding similarity of the patterns. For example, when a multi-dimensional scaling pattern is used to generate a three-dimensional representation of data clusters associated with BRCA1-like, BRCA2-like or non-BRCA-like tumors, the position of a data point obtained from the tumor specimen that is being analyzed can indicate whether the tumor specimen has a pattern of expression associated with one of these groups. If the data point from the tumor specimen is present within or closely associated with one of these clusters, it is assigned a classification the same as the cluster in which is it contained or with which it is associated.

[0016] Another approach to comparing patterns of over expression and under expression is to assign different color intensities to standard normal deviation values of the logarithmic expression ratios. Similarities of color patterns can then be used to arrive at a qualitative assignment of a tumor specimen to a classification. In another approach, the logarithmic expression ratios of the plurality markers is compared using compound covariate predictor analysis.

[0017] In particular examples discussed herein, a BRCA1-like ovarian tumor is differentiated from a non-BRCA-like ovarian tumor by comparing relative logarithmic expression ratios of at least one marker shown in Table 6. In more particular embodiments, the pattern of expression of all the markers in Table 6 (CD72, SLC25A11, LCN2, PSTP1P1, SIAHBP1, UBE1, WAS, IDH2, and PC7K1) is compared to the pattern of expression of these same markers in the specimen undergoing classification.

[0018] In another example, a BRCA2-like ovarian tumor is distinguished from a non-BRCA-like ovarian tumor by comparing relative logarithmic expression ratios of at least one marker shown in Table 7, and in some embodiments both of the markers (LOC51760 and LRPAP1). In yet other examples BRCA1- and BRCA2-like ovarian tumors are distinguished from non-BRCA-like ovarian tumors by comparing relative logarithmic expression ratios of at least one marker shown in Table 8, for example PSTP1P1, IDH2, and PCTK1, or all the markers in Table 8. In other examples, a BRCA1-like ovarian tumor is distinguished from a BRCA2-like ovarian tumor by comparing relative logarithmic expression ratios of at least one marker shown in Table 10, more than one marker shown in Table 10, or all the markers in Table 10.

[0019] The disclosed methods also include selecting a treatment strategy based on classifying the ovarian tumor as BRCA1-like, BRCA2-like or non-BRCA-like. For example, the treatment strategy may include selecting a more aggressive treatment regimen for a BRCA1-like or BRCA2-like tumor (even if the tumor does not contain a BRCA1 or BRCA2 mutation). Such treatment regimens can include chemotherapy, radiotherapy, or surgical removal of the tumor and/or surrounding tissue.

[0020] In yet other disclosed examples, the expression patterns of a tumor specimen and known comparison tissue are compared using a database of patterns (for example a database of logarithmic expression patterns) associated with BRCA1-like, BRCA2-like or non-BRCA-like ovarian tumors. The database can contain, for example, expression ratios of the plurality of markers in standard tissue. The patterns of the expression ratios of the plurality of markers of the tumor specimen can then be compared to the pattern of expression ratios of the same markers in the standard tissue.

[0021] In some examples, comparisons may be made just of patterns of over expression, for one or more markers that is over expressed as listed in Table 5. Alternatively, comparisons may be made just of patterns of under expression. The patterns of expression may be obtained by using nucleic acid sequences of the markers to perform nucleic acid hybridization of specific oligonucleotide probes to the nucleic acid sequences. The markers may be amplified prior to performing nucleic acid hybridization, and expression quantitated to detect a level of differential expression. The markers are conveniently provided on an array, such as a cDNA microarray. In one example the cDNA microarray contains at least 50, 100, 200, 400 or more of the markers listed in Table 1.

[0022] The results of these comparisons can be used to diagnose or provide a prognosis of progression of ovarian cancer in a subject. The patterns of expression can also be used to screen for therapeutic agents for the treatment of ovarian cancer, or monitoring response to therapy in a subject, by looking for a return of the patterns of expression of the ovarian tumor toward a non-tumor tissue pattern. Kits are also provided for performing these analyses, and the kit may include arrays with cDNAs of the markers.

### BRIEF DESCRIPTION OF THE FIGURES

[0023] FIG. 1 shows the overall expression differences between BRCA1-like, BRCA2-like, and non-BRCA-like ovarian epithelial cancers. FIG. 1A. Multidimensional scaling model based on the overall gene expression (6,445 filtered spots, Example 1) in BRCA1-linked (solid circles), BRCA2-linked (open circles), and sporadic tumors (asterisks). FIG. 1B. The magnitude of differences in gene expression between various tumor groups as revealed by the number of genes differentially expressed among them using the uniform statistical cutoff P<0.0001.

[0024] FIG. 2 illustrates that BRCA1- and BRCA2-discriminating genes also segregate sporadic ovarian cancers into two groups (BRCA1-like and BRCA2-like). FIG. 2A. Hierarchical clustering of 110 non-redundant genes (see Table 9, Addendum) showing significant differential expression between BRCA1-linked and (B1) and BRCA2-linked (B2) tumors (modified F-test P<0.0001). The red and green color intensities represent standard normal deviation (Z-score) values from the mean expression level of each gene (represented as black) across sixty-one tumor samples (Example 1). FIG. 2A′ is a duplication of FIG. 2A, but is printed in grey tones rather than in color. FIG. 2B. Hierarchical clustering of sporadic and BRCA-linked tumor samples based on the expression pattern of the 110 BRCA-discriminating patterns of gene expression. The B-, B2-, and C-labeled samples signify BRCA1-linked, BRCA2-linked, and sporadic tumors, respectively. FIG. 2C. Hierarchical clustering of sporadic samples in the absence of BRCA-linked tumors reveals two major clusters corresponding to BRCA1-type and BRCA2-type patterns of gene expression.

[0025] FIG. 3 shows molecular profiles of sixty-one tumors as defined by the genes whose expression significantly differentiated BRCA1 and BRCA2 tumors (P<0.0001) (see Example 1, and Table 9). The red and green color intensities represent expression levels shown as standard normal deviation (Z-score) values from the mean expression level of each gene (represented as black) across sixty-one tumor samples. The genes are numbered consecutively 1-61 in FIG. 3A, and 62-116 in FIG. 3B. FIG. 3A′ and FIG. 3B′ are duplications of FIG. 3A and FIG. 3B, respectively, but are printed in grey tones rather than in color. FIG. 3C shows the correlation of the designated rows to genes and SEQ ID NOs for the molecular profile in FIG. 3A and FIG. 3D shows the correlation of the designated rows to genes and SEQ ID NOs for the molecular profile in FIG. 3B.

[0026] FIG. 4 shows gene expression differences between BRCA-linked and sporadic tumors. A modified F-test with a statistical significance level of P<0.0001 was used to evaluate genes differentially expressed between tumor types. The red and green color intensities represent expression levels shown as standard normal deviation (Z-score) values from the mean expression level of each gene (represented as black) across all sixty-one tumor samples. Each gene name is followed by the corresponding I.M.A.G.E. clone number spotted on the array. FIG. 4A. Genes differentially expressed between BRCA1-linked (B) and sporadic (C) samples. Genes located on Xp11 appear in red. FIG. 4B. Examples of genes differentially expressed between BRCA2-linked (B2) and sporadic (C) samples. FIG. 4C. Examples of differentially expressed genes between the combined BRCA1- and BRCA2-linked group (B and B2, respectively) and the sporadic (C) samples. FIG. 4A-C′ is a duplication of FIG. 4A-C, but is printed in grey tones rather than in color. FIG. 4D BRCA1-linked tumors exhibit significantly higher expression levels (P<0.001) of all six genes mapped to Xp11.23 compared to the sporadic cancers. Error bars reflect standard error.

[0027] FIG. 5 is a bar graph showing an evaluation of gene expression patterns common to BRCA-linked and sporadic tumors. FIG. 5A shows the expression of twenty-five genes that showed two-fold or greater down-regulation as compared to the IOSE reference cell line. FIG. 5B shows the expression of twenty-five genes that showed two-fold or greater up-regulation as compared to the IOSE reference cell line. Error bars reflect standard error. (FOS, HE4 and CD24) have been previously reported to be overexpressed in ovarian cancers. Several of the overexpressed genes that have been demonstrated to be interferon-responsive are presented in italics. The * symbol denotes immediate-early response genes.

[0028] FIG. 6 is a series of bar graphs illustrating semi-quantitative RT-PCR (sqRT-PCR) analysis of gene expression confirms the cDNA microarray data. Expression patterns of select genes were examined using sqRT-PCR in representative BRCA1-linked (bars 1-5), BRCA2-linked (bars 6-10), and sporadic (bars 11-15) samples. The expression level of each gene in the tumor samples was compared to those of normal postmenopausal ovary (N) and the reference IOSE cells (R). All data has been normalized to β-actin is presented as fold expression compared to the IOSE reference RNA. FIG. 6A shows results for genes HE4, RSG1, and CD74. FIG. 6B shows results for genes ZFP36, TOP2A and HLA-DRB1.

### BRIEF DESCRIPTION OF THE TABLES

[0029] TABLE 1 (see Addendum) lists 822 ovarian cancer-related nucleic acid molecules that show altered expression in ovarian cancer. The nucleic acids are identified by their SEQ ID NO, their gene name (if one has been assigned), the I.M.A.G.E Clone ID number associated with the nucleic acid sequence, the UniGene number (if one has been assigned), and a description of the gene (if known). Because more than one GenBank Accession Number is sometimes provided for a given nucleic acid molecule, the Table groups the SEQ ID NO assigned to each GenBank Accession Number with nucleic acid molecule. For example, the entry for BCKDHB in Table 1 provides SEQ ID NOs: 16-17 (represented by GenBank Accession number AA427739 and GenBank Accession number AA434304). Each of the 822 SEQ ID NOs are included in the attached sequence listing.

[0030] TABLE 2 catalogs the clinicopathologic features of the tumor samples in a study of sixty-one cases of pathologically-confirmed epithelial ovarian adenocarcinoma.

[0031] TABLE 3 lists representative gene-specific primer sequences used to amplify RNA for analysis by semi-quantitative PCR.

[0032] TABLE 4 (see Addendum) lists markers that were under-expressed in ovarian cancer in a comparison of ovarian epithelial cancer cells to normal postmenopausal ovarian tissue.

[0033] TABLE 5 (see Addendum) lists markers that were ove-rexpressed in ovarian cancer in a comparison of ovarian epithelial cancer cells to normal postmenopausal ovarian tissue.

[0034] TABLE 6 (see Addendum) lists markers that were differentially expressed between BRCA1-linked and sporadic tumors in a comparison to reference immortalized ovarian epithelial cells.

[0035] TABLE 7 (see Addendum) lists markers that were differentially expressed between BRCA2-linked and sporadic tumors in a comparison to reference immortalized ovarian epithelial cells.

[0036] TABLE 8 (see Addendum) lists markers that were differentially expressed between combined BRCA1-linked and BRCA2-linked versus sporadic tumors in a comparison to reference immortalized ovarian epithelial cells.

[0037] TABLE 9 (see Addendum) lists markers that were differentially expressed between BRCA 1-linked and BRCA2-linked tumors in a comparison to reference immortalized ovarian epithelial cells.

[0038] TABLE 10 (see Addendum) lists markers that can be used to segregate BRCA1-like from BRCA2-like tumor types using compound covariate prediction analysis.

[0039] TABLE 11 (see Addendum) lists the results of compound covariate predictor analysis for the sixty-one tumors disclosed herein, analyzed using the markers in Table 10.

### BRIEF DESCRIPTION OF THE SEQUENCE LISTING

[0040] The nucleic and amino acid sequences listed in the accompanying sequence listing are shown using standard letter abbreviations for nucleotide bases, and single letter code for amino acids, as defined in 37 C.F.R. § 1.822. Only one strand of each nucleic acid sequence is shown, but the complementary strand is understood as included by any reference to the displayed strand. In the accompanying sequence listing:

[0041] SEQ ID NO: 1 is a 63-nucleotide synthetic primer containing a T7 RNA polymerase binding site.

[0042] SEQ ID NOs: 2 and 3 are ACTB gene-specific primers used for amplification during semi-quantitative RT-PCR.

[0043] SEQ ID NOs: 4 and 5 are HE4 gene-specific primers used for amplification during semi-quantitative RT-PCR.

[0044] SEQ ID NOs: 6 and 7 are ZFP36 gene specific primers used for amplification during semi-quantitative RT-PCR.

[0045] SEQ ID NOs: 8 and 9 are RGS1 gene specific primers used for amplification during semi-quantitative RT-PCR.

[0046] SEQ ID NOs: 10 and 11 are CD74 gene specific primers used for amplification during semi-quantitative RT-PCR.

[0047] SEQ ID NOs: 12 and 13 are TOP2A gene specific primers used for amplification during semi-quantitative RT-PCR.

[0048] SEQ ID NOs: 14 and 15 are HLA-DRB1 gene specific primers used for amplification during semi-quantitative RT-PCR.

[0049] SEQ ID NOs: 16 through 822 are ovarian cancer-related nucleic acid molecules that show altered expression in ovarian cancer. These nucleic acid molecules are listed in Table 1, and their sequence information is provided in the attached sequence listing.

### DETAILED DESCRIPTION

1. Abbreviations

[0050] cDNA: complementary DNA

[0051] DNA: deoxyribonucleic acid

[0052] ELISA: enzyme-linked immunosorbent assay

[0053] EST: expressed sequence tag

[0054] I.M.A.G.E.: Integrated Molecular Analysis of Genomes and their Expression Consortium

[0055] IOSE: immortalized ovarian surface epithelial cell lines

[0056] MDS: multidimensional scaling

[0057] PCR: polymerase chain reaction

[0058] RIA: radioimmunoassay

[0059] RNA: ribonucleic acid

[0060] RT-PCR: reverse transcription-polymerase chain reaction

[0061] siRNA: small inhibitory RNA molecule

[0062] sqRT-PCR: semi-quantitative reverse transcription-polymerase chain reaction

[0063] STS: sequence-tagged site

II. Terms

[0064] Unless otherwise noted, technical terms are used according to conventional usage. Definitions of common terms in molecular biology may be found in Benjamin Lewin, Genes V, published by Oxford University Press, 1994 (ISBN 0-19-854287-9); Kendrew et al. (eds.), The Encyclopedia of Molecular Biology, published by Blackwell Science Ltd., 1994 (ISBN 0-632-02182-9); and Robert A. Meyers (ed.), Molecular Biology and Biotechnology: a Comprehensive Desk Reference, published by VCH Publishers, Inc., 1995 (ISBN 1-56081-569-8).

[0065] In accordance with the present disclosure, conventional molecular biology, microbiology, and recombinant DNA techniques within the skill of the art are used. Such techniques are fully explained in the literature (see, e.g., Sambrook et al., 1989. Molecular cloning, a laboratory manual. 2^{nd} ed. Cold Spring Harbor Laboratory, Cold spring Harbor, N.Y.; Glover, 1985, DNA Cloning: A practical approach, volumes I and II oligonucleotide synthesis, MRL Press, LTD., Oxford, U.K.; Hames and Higgins, 1985, Transcription and translation; Hames and Higgins, 1984, Animal Cell Culture; Freshney, 1986, Immobilized Cells And Enzymes, IRL Press; and Perbal, A Practical Guide to Molecular Cloning, John Wiley & Sons, New York, 1988).

[0066] In order to facilitate review of the various embodiments of the invention, the following explanations of specific terms are provided:

[0067] Altered expression or differential expression refers to expression of a nucleic acid (e.g., mRNA or protein) in a subject or biological sample from a subject that deviates from that expression in a subject or biological sample from a subject having normal (wild-type) characteristics for the biological condition associated with the nucleic acid. Normal expression can be found in a control, a standard for a population, etc. For instance, where the altered expression manifests as a diseased condition, such as growth of a tumor or neoplasia or onset of a cancer such as ovarian cancer, characteristics of normal expression might include an individual who is not suffering from the condition (e.g., a subject not displaying neoplasia growth or not having ovarian cancer), a population standard of individuals believed not to be suffering from the disease, etc. For instance, certain altered expression (such as altered expression of a BRCA nucleic acid), can be described as being associated with the biological conditions of altered (e.g., over-expressed or under-expressed) nucleic acid expression and a tendency to develop gynecological cancer, such as ovarian cancer. Likewise, altered expression may be associated with a disease. The term “associated with” includes an increased risk of developing the disease.

[0068] Controls or standards (e.g., a reference cell line, such as immortalized epithelial ovarian cells) for comparison to a sample (e.g., an ovarian cancer tumor), for the determination of altered expression, include samples believed to be normal for the studied characteristic, as well as laboratory values, even though possibly arbitrarily set, keeping in mind that such values may vary from laboratory to laboratory. Laboratory standards and values may be set based on a known or determined population value and may be supplied in the format of a graph or table that permits easy comparison of measured, experimentally determined values.

[0069] When used in reference to a nucleic acid, amplification includes techniques that increase the number of copies of a nucleic acid molecule in a sample or specimen. An example of amplification is the polymerase chain reaction, in which a biological sample collected from a subject is contacted with a pair of oligonucleotide primers, under conditions that allow for the hybridization of the primers to nucleic acid template in the sample. The primers are extended under suitable conditions, dissociated from the template, and then re-annealed, extended, and dissociated to amplify the number of copies of the nucleic acid. The product of in vitro amplification can be characterized by electrophoresis, restriction endonuclease cleavage patterns, oligonucleotide hybridization or ligation, and/or nucleic acid sequencing, using standard techniques. Other examples of in vitro amplification techniques include strand displacement amplification (see U.S. Pat. No. 5,744,311); transcription-free isothermal amplification (see U.S. Pat. No. 6,033,881); repair chain reaction amplification (see WO 90/01069); ligase chain reaction amplification (see EP-A-320 308); gap filling ligase chain reaction amplification (see U.S. Pat. No. 5,427,930); coupled ligase detection and PCR (see U.S. Pat. No. 6,027,889); and NASBA™ RNA transcription-free amplification (see U.S. Pat. No. 6,025,134).

[0070] An array is an arrangement of molecules, particularly biological macromolecules (such as polypeptides or nucleic acids) or cell or tissue samples, in addressable locations on or in a substrate. The array may be regular (arranged in uniform rows and columns, for instance) or irregular. The number of addressable locations on the array can vary, for example from a few (such as three) to more than 50, 100, 200, 500, 1000, 10,000, or more. A microarray is an array that is miniaturized so as to require or be aided by microscopic examination for evaluation or analysis. A cDNA microarray is an array of multiple cDNA molecules, fixed in addressable locations, to which complementary nucleic acids in applied samples may hybridize (see Hegde et al., Biotechniques 29(3): 548-562, 2000). cDNA microarrays of the disclosure provide for qualitative and quantitative analysis of gene expression of the molecules contained in the array.

[0071] Within an array, each arrayed sample (feature) is addressable, in that its location can be reliably and consistently determined within the at least two dimensions of the array. Thus, in ordered arrays the location of each sample is assigned to the sample at the time when it is applied to the array, and a key may be provided in order to correlate each location with the appropriate target or feature position. Often, ordered arrays are arranged in a symmetrical grid pattern, but samples could be arranged in other patterns (e.g., in radially distributed lines, spiral lines, or ordered clusters). Addressable arrays usually are computer readable, in that a computer can be programmed to correlate a particular address on the array with information about the sample at that position (e.g., expression data, including for instance signal intensity as well as the identity of the sample). In some examples of computer readable formats, the individual features in the array are arranged regularly, for instance in a Cartesian grid pattern, which can be correlated to address information by a computer.

[0072] The sample application location on an array (the “feature”) may assume many different shapes. Thus, though the term “spot” may be used herein, it refers generally to a localized placement of molecules or tissue or cells, and is not limited to a round or substantially round region. For instance, substantially square regions of application can be used with arrays encompassed herein, as can be regions that are, for example, substantially rectangular, triangular, oval, irregular, or another shape. Within a single array, feature shapes do not usually vary, though they will in some embodiments.

[0073] In certain example arrays, one or more features will occur on the array a plurality of times (e.g., twice) to provide internal controls.

[0074] A biological sample is any sample in which the presence of a protein and/or ongoing expression of a protein may be detected. Suitable biological samples include samples containing genomic DNA or RNA (including mRNA), obtained from body cells of a subject, such as but not limited to those present in peripheral blood, urine, saliva, cells obtained by pap smear, sera, tissue biopsy, surgical specimen, amniocentesis samples and autopsy material.

[0075] A BRCA1-like tumor is a tumor in which the gene expression pattern is substantially similar to the gene expression pattern in a tumor from a subject who has a mutation in BRCA1. Similarly, a BRCA2-like tumor is a tumor in which the gene expression pattern is substantially similar to the gene expression pattern in a tumor from a subject who has a mutation in BRCA2. As described herein, sporadic tumors may share gene expression patterns with BRCA-linked and or BRCA2-linked tumors. Hence, sporadic and other tumors (such as tumors for which no BRCA genetic test has been conducted) that have gene expression patterns similar to a BRCA1-linked tumor are “BRCA1-like” tumors.

[0076] A cancer is a biological condition in which a malignant tumor or other neoplasm has undergone characteristic anaplasia with loss of differentiation, increased rate of growth, invasion of surrounding tissue, and/or which is capable of metastasis.

[0077] The term cancer includes ovarian cancer, such as ovarian epithelial cancer, which originates in the ovaries and may manifest as epithelial tumors, germ cell tumors, or stromal tumors. Also included are different stages of a single cancer, for instance both primary and recurrent ovarian cancer, and cancer at any progressive stage, such as Stages I-IV. Ovarian cancer is considered a gynecological cancer.

[0078] A subject may be classified into an ovarian cancer stage based upon evaluation of a biological sample from the subject for indices known in the art or disclosed herein as being indicative of that stage of ovarian cancer. For example, a subject may be classified as having a cancer state of cancer-free, active ovarian cancer (i.e., stage I, II, III, or IV ovarian cancer), or in remission from previous ovarian cancer.

[0079] cDNA is a piece of DNA lacking internal, non-coding segments (introns) and regulatory sequences that determine transcription. cDNA is generally synthesized in the laboratory by reverse transcription from messenger RNA extracted from cells.

[0080] Compound covariate prediction analysis is a method of predicting into which of two groups a sample will be assinged using a given statistical signficance cutoff (e.g., P<0.0005). The method creates a multivariate predictor for one of two classes to each sample and includes in the multivariate predictor only those components (e.g., nucleic acids expressing on a cDNA microarray) that meet the statistical signficance cutoff. The multivariate predictor is a weighted linear combination of logarithmic ratios for components that are univariately significant. The weight consists of the univariate t-statistics for comparing the classes.

[0081] DNA is a polymer that comprises the genetic material of most living organisms (some viruses have genomes comprising RNA). The repeating units in most natural DNA polymers are four different nucleotides, each of which comprises one of the four bases, adenine, guanine, cytosine and thymine, bound to a deoxyribose sugar to which a phosphate group is attached. Triplets of nucleotides (referred to as codons) code for each amino acid in a polypeptide, or for a stop signal. The term codon is also used for the corresponding (and complementary) sequences of three nucleotides in the mRNA into which the DNA sequence is transcribed.

[0082] Unless otherwise specified, any reference to a DNA molecule is intended to include the reverse complement of that DNA molecule. Except where single-strandedness is required by the text herein, DNA molecules, though written to depict only a single strand, encompass both strands of a double-stranded DNA molecule. Thus, a reference to the nucleic acid molecule that encodes a specific protein, or a fragment thereof, encompasses both the sense strand and its reverse complement. Thus, for instance, it is appropriate to generate primers from the reverse complement sequence of the disclosed nucleic acid molecules.

[0083] An expressed sequence tag (EST) is a unique stretch of DNA within a coding region of a gene that is useful for identifying full-length genes and serves as a landmark for gene mapping. An EST is a sequence tagged site (STS) derived from cDNA.

[0084] Expression of a gene is the process by which the coded information of a gene is converted into an operational or non-operational part of a cell, often including the synthesis of a protein. Gene expression can be influenced by external signals. For instance, exposure of a cell to a hormone may stimulate expression of a hormone-induced gene. Different types of cells may respond differently to an identical signal.

[0085] Expression of a gene also may be regulated in the pathway from DNA to RNA to protein. Ways in which regulation occurs include through controls acting on transcription, translation, RNA transport and processing, degradation of intermediary molecules such as mRNA, or through activation, inactivation or compartmentalization or degradation of specific protein molecules after they have been made.

[0086] Changes in gene expression may be associated with specific types of cancer (and cancer progression). Such association is fairly specific to the type of cancer, and thus what is overexpressed in one cancer may be underexpressed (or unchanged) in another.

[0087] The expression of several genes may be grouped into an expression pattern or expression profile. Such patterns or profiles may be unique to an individual sample depending upon certain factors, for instance biological stimuli introduced into the subject from which the sample was taken (e.g., a hormone) or ongoing disease within the subject (e.g., ovarian cancer). Thus, a collection or set of genes/proteins that are differentially regulated in a specific cancer may be indicative and specifically diagnostic of that type of cancer. In addition, specific expression patterns may indicate particular mutations within the individual that correlate and/or cause the disease, for instance a mutation in BRCA1 or BRCA2, or may indicate a larger class of disease, such as a BRCA1-like or BRCA2-like cancer. Furthermore, changing the expression patterns of these genes to restore the normal state, or bring the condition closer to the normal state in one or more characteristic, may constitute a treatment for cancer.

[0088] As disclosed herein, the expression pattern of an unknown tumor may be compared to the expression pattern of known BRCA1-linked and BRCA2-linked markers to determine if the expression patterns are sufficiently similar to classify the unknown as a BRCA1-like or BRCA2-like tumor.

[0089] Gene amplification or genomic amplification is an increase in the copy number of a gene or a fragment or region of a gene or associated 5′ or 3′ region, as compared to the copy number in normal tissue. An example of a genomic amplification is an increase in the copy number of an oncogene. A “gene deletion” is a deletion of one or more nucleic acids normally present in a gene sequence and, in extreme examples, can include deletions of entire genes or even portions of chromosomes.

[0090] A gene expression fingerprint (or profile) is a distinct or identifiable pattern of gene expression, for instance a pattern of high and low expression of a defined set of genes or gene-indicative nucleic acids such as ESTs; in some instances, as few as one or two genes may provide a profile, but often more genes are used in a profile, for instance at least three, at least 5, at least 10, at least 20, at least 25, or at least 50 or more. Gene expression fingerprints (also referred to as profiles) can be linked to a tissue or cell type, to a particular stage of normal tissue growth or disease progression, or to any other distinct or identifiable condition that influences gene expression in a predictable way. Gene expression fingerprints can include relative as well as absolute expression levels of specific genes, and often are best viewed in the context of a test sample compared to a baseline or control sample fingerprint. By way of example, a gene expression profile may be read on an array (e.g., a polynucleotide or polypeptide array). Arrays are now weIl known, and for instance gene expression arrays have been previously described in published PCT application number WO9948916 (“Hypoxia-Inducible Human Genes, Proteins, and Uses Thereof”), incorporated herein by reference in its entirety.

[0091] As disclosed herein, the gene expression profile of an unknown tumor may be compared for similarities and differences to the expression profile of a tumor known to express in a BRCA-like manner (e.g., a BRCA1-like or BRCA2-like tumor).

[0092] A genomic target sequence is a sequence of nucleotides located in a particular region in the human genome that corresponds to one or more specific genetic abnormalities, such as a nucleotide polymorphism, a deletion, or amplification. The target can be for instance a coding sequence; it can also be the non-coding strand that corresponds to a coding sequence.

[0093] Gynecological cancers are cancers of the female reproductive system, and include cancers of the uterus (e.g., endometrial carcinoma), cervix (e.g., cervical carcinoma), ovaries (e.g., ovarian carcinoma, serous cystadenocarcinoma, mucinous cystadenocarcinoma, endometrioid tumors, celioblastoma, clear cell carcinoma, unclassified carcinoma, granulosa-thecal cell tumors, Sertoli-Leydig cell tumors, dysgerminoma, malignant teratoma), vulva (e.g., squamous cell carcinoma, intraepithelial carcinoma, adenocarcinoma, fibrosarcoma, melanoma), vagina (e.g., clear cell carcinoma, squamous cell carcinoma, botryoid sarcoma), embryonal rhabdomyosarcoma, and fallopian tubes (e.g., carcinoma).

[0094] An isolated biological component (such as a nucleic acid, peptide or protein) has been substantially separated, produced apart from, or purified away from other biological components in the cell of the organism in which the component naturally occurs, i.e., other chromosomal and extrachromosomal DNA and RNA, and proteins. Nucleic acids, peptides and proteins that have been isolated thus include nucleic acids and proteins purified by standard purification methods. The term also embraces nucleic acids, peptides and proteins prepared by recombinant expression in a host cell as well as chemically synthesized nucleic acids.

[0095] A marker is a diagnostic indicator of disease. A marker may consist of any signal indicating the presence of the disease, e.g., a physiological change in the body of a subject or increased or decreased levels of a substance such as a protein correlated to the disease. Markers are often found in body fluid samples from a subject. By way of example, prostate specific antigen is a tumor marker used to detect progression of prostate cancer. The molecules disclosed herein, for instance in Table 1 are useful as tumor markers for diagnosing, prognosing, staging, preventing, and treating cancerous disease, such as ovarian cancer.

[0096] A mutation includes any change of the DNA sequence within a gene or chromosome. In some instances, a mutation will alter a characteristic or trait (phenotype), but this is not always the case. Types of mutations include base substitution point mutations (e.g., transitions or transversions), deletions, and insertions. Missense mutations are those that introduce a different amino acid into the sequence of the encoded protein; nonsense mutations are those that introduce a new stop codon. In the case of insertions or deletions, mutations can be in-frame (not changing the frame of the overall sequence) or frame shift mutations, which may result in the misreading of a large number of codons (and often leads to abnormal termination of the encoded product due to the presence of a stop codon in the alternative frame).

[0097] This term specifically encompasses variations that arise through somatic mutation, for instance those that are found only in disease cells, but not constitutionally. in a given individual. Examples of such somatically-acquired variations include the point mutations that frequently result in altered function of various genes that are involved in development of cancers. This term also encompasses DNA alterations that are present constitutionally, that alter the function of the encoded protein in a readily demonstrable manner, and that can be inherited by the children of an affected individual. In this respect, the term overlaps with “polymorphism,” as defined below, but generally refers to the subset of constitutional alterations that have arisen within the past few generations in a kindred and that are not widely disseminated in a population group. In particular embodiments, the term is directed to those constitutional alterations that have major impact on the health of affected individuals, such as those resulting in onset of a disease such as a gynecological cancer.

[0098] An oligonucleotide is a plurality of joined nucleotides joined by native phosphodiester bonds, between about 6 and about 300 nucleotides in length. An oligonucleotide analog refers to moieties that function similarly to oligonucleotides but have non-naturally occurring portions. For example, oligonucleotide analogs can contain non-naturally occurring portions, such as altered sugar moieties or inter-sugar linkages, such as a phosphorothioate oligodeoxynucleotide. Functional analogs of naturally occurring polynucleotides can bind to RNA or DNA, and include peptide nucleic acid (PNA) molecules.

[0099] Particular oligonucleotides and oligonucleotide analogs can include linear sequences up to about 200 nucleotides in length, for example a sequence (such as DNA or RNA) that is at least 6 bases, for example at least 8, 10, 15, 20, 25, 30, 35, 40, 45, 50, 100 or even 200 bases long, or from about 6 to about 50 bases, for example about 10-25 bases, such as 12, 15 or 20 bases.

[0100] A neoplasm is a new and abnormal growth, particularly a new growth of tissue or cells in which the growth is uncontrolled and progressive. A tumor is an example of a neoplasm.

[0101] A non-BRCA-type tumor is a tumor in which the gene expression pattern of the BRCA1-linked and BRCA2-linked markers disclosed in Table 1 is not similar to either a BRCA1-like or BRCA2-like gene expression pattern.

[0102] A nucleic acid is a deoxyribonucleotide or ribonucleotide polymer in either single or double stranded form, and unless otherwise limited, encompasses known analogues of natural nucleotides that hybridize to nucleic acids in a manner similar to naturally occurring nucleotides.

[0103] A nucleic acid sequence (or polynucleotide) is a DNA or RNA molecule, and includes polynucleotides encoding full-length proteins and/or fragments of such full length proteins which can function as a therapeutic agent.

[0104] Nucleotide includes, but is not limited to, a monomer that includes a base linked to a sugar, such as a pyrimidine, purine or synthetic analogs thereof, or a base linked to an amino acid, as in a peptide nucleic acid (PNA). A nucleotide is one monomer in a polynucleotide. A nucleotide sequence refers to the sequence of bases in a polynucleotide.

[0105] A first nucleic acid sequence is operably linked with a second nucleic acid sequence when the first nucleic acid sequence is placed in a functional relationship with the second nucleic acid sequence. For instance, a promoter is operably linked to a coding sequence if the promoter affects the transcription or expression of the coding sequence. Generally, operably linked DNA sequences are contiguous and, where necessary to join two protein-coding regions, in the same reading frame.

[0106] An ovarian cancer-related molecule includes nucleic acids (such as DNA or RNA or cDNA) and proteins that are altered (for example by mutation or abnormal expression) in ovarian cancer.

[0107] Pharmaceutically acceptable carriers include compositions and formulations suitable for pharmaceutical delivery of the nucleotides and proteins herein disclosed. Martin, Remington's Pharmaceutical Sciences, published by Mack Publishing Co., Easton, Pa., 19th Edition, 1995, describes conventional pharmaceutically acceptable carriers.

[0108] In general, the nature of the carrier will depend on the particular mode of administration being employed. For instance, parenteral formulations usually comprise injectable fluids that include pharmaceutically and physiologically acceptable fluids such as water, physiological saline, balanced salt solutions, aqueous dextrose, glycerol or the like as a vehicle. For solid compositions (e.g., powder, pill, tablet, or capsule forms), conventional non-toxic solid carriers can include, for example, pharmaceutical grades of mannitol, lactose, starch, or magnesium stearate. In addition to biologically-neutral carriers, pharmaceutical compositions to be administered can contain minor amounts of non-toxic auxiliary substances, such as wetting or emulsifying agents, preservatives, and pH buffering agents and the like, for example sodium acetate or sorbitan monolaurate.

[0109] Primers are short nucleic acids, preferably DNA oligonucleotides 10 nucleotides or more in length, which are annealed to a complementary target DNA strand by nucleic acid hybridization to form a hybrid between the primer and the target DNA strand, then extended along the target DNA strand by a DNA polymerase enzyme. Primer pairs can be used for amplification of a nucleic acid sequence, e.g., by the polymerase chain reaction (PCR) or other nucleic-acid amplification methods known in the art.

[0110] Primers as used in the present disclosure preferably comprise at least 10 nucleotides of the nucleic acid sequences that are shown to encode specific proteins. In order to enhance specificity, longer primers may also be employed, such as primers that comprise 15, 20, 30, 40, 50, 60, 70, 80, 90 or 100 consecutive nucleotides of the disclosed nucleic acid sequences. Methods for preparing and using probes and primers are described in the references, for example Sambrook et al. (1989) Molecular Cloning: A Laboratory Manual, Cold Spring Harbor, N.Y.; Ausubel et al. (1987) Current Protocols in Molecular Biology, Greene Publ. Assoc. & Wiley-Intersciences; Innis et al. (1990) PCR Protocols, A Guide to Methods and Applications, Innis et al. (Eds.), Academic Press, San Diego, Calif. PCR primer pairs can be derived from a known sequence, for example, by using computer programs intended for that purpose such as Primer (Version 0.5, 1991, Whitehead Institute for Biomedical Research, Cambridge, Mass.).

[0111] When referring to a primer, the term specific for (a target sequence) indicates that the primer hybridizes under stringent conditions substantially only to the target sequence in a given sample comprising the target sequence.

[0112] A probe comprises an isolated nucleic acid attached to a detectable label or other reporter molecule. Typical labels include radioactive isotopes, enzyme substrates, co-factors, ligands, chemiluminescent or fluorescent agents, haptens, and enzymes. Methods for labeling and guidance in the choice of labels appropriate for various purposes are discussed, e.g., Sambrook et al. (In Molecular Cloning, A Laboratory Manual, CSHL, New York, 1989) and Ausubel et al. (In Current Protocols in Molecular Biology, John Wiley & Sons, New York, 1998).

[0113] A protein is a biological molecule expressed by a gene and comprised of amino acids.

[0114] A purified molecule is one that has been purified relative to its original environment. The term “purified” does not require absolute purity; rather, it is intended as a relative term. Thus, for example, a purified protein preparation is one in which the protein referred to is more pure than the protein in its natural environment within a cell or within a production reaction chamber (as appropriate). Non-limiting examples of purified molecules are those that are 50%, 75%, or 90% pure.

[0115] A recombinant nucleic acid is a sequence that is not naturally occurring or has a sequence that is made by an artificial combination of two otherwise separated segments of sequence. This artificial combination is often accomplished by chemical synthesis or, more commonly, by the artificial manipulation of isolated segments of nucleic acids, e.g., by genetic engineering techniques such as those described in Sambrook et al., In Molecular Cloning: A Laboratory Manual, CSHL, New York, 1989. The term recombinant includes nucleic acids that have been altered solely by deletion of a portion of the nucleic acid. For instance, a plasmid is recombinant if some portion of the naturally occurring plasmid has been deleted. Equally, if the sequence of such a plasmid has been altered, for example by a nucleotide substitution (or addition or deletion), that plasmid is said to be recombinant.

[0116] Sequence identity is the similarity between two nucleic acid sequences, or two amino acid sequences is expressed in terms of the similarity between the sequences, otherwise referred to as sequence identity. Sequence identity is frequently measured in terms of percentage identity (or similarity or homology); the higher the percentage, the more similar are the two sequences. Methods of alignment of sequences for comparison are well-known in the art. Various programs and alignment algorithms are described in: Smith and Waterman, J. Theor. Biol. 91(2): 379-380, 1981; Needleman and Wunsch, J. Mol. Bio. 48:443-453, 1970; Pearson and Lipman, Methods in Molec. Biology 24: 307-331, 1988; Higgins and Sharp, Gene 73:237-244, 1988; Higgins and Sharp, CABIOS 5:151-153, 1989; Corpet et al., Nucleic Acids Research 16:10881-10890, 1988; Huang et al., Computer Applications in BioSciences 8:155-165,1992; and Pearson et al., Meth. Mol. Bio. 24: 307-331,1994. Altschul et al., Nat. Genet. 6(2): 119-129, 1994 presents a detailed consideration of sequence alignment methods and homology calculations.

[0117] The NCBI Basic Local Alignment Search Tool (BLAST) (see Altschul et al. J. Mol. Biol. 215: 403-410, 1990) is available from several sources, including the National Center for Biotechnology Information (NCBI, Bethesda, Md.) and on the Internet, for use in connection with the sequence analysis programs blastp, blastn, blastx, tblastn and tblastx. The Search Tool can be accessed at the NCBI website, together with a description of how to determine sequence identity using this program.

[0118] Nucleic acid sequences that do not show a high degree of identity can nevertheless encode similar amino acid sequences, due to the degeneracy of the genetic code. It is understood that changes in nucleic acid sequence can be made using this degeneracy to produce multiple nucleic acid molecules that all encode substantially the same protein.

[0119] Serial analysis of gene expression (SAGE) is the use of short diagnostic sequence tags to allow the quantitative and simultaneous analysis of a large number of transcripts in tissue, as described in Velculescu et al., Science 270:484-487, 1995.

[0120] A standard is a reference against which a value (e.g., level of expression of a marker) can be compared. By way of example, a non-cancerous cell line may be used as a standard for comparing the level of expression of tumor markers in an ovarian tumor sample. Non-limiting examples of standards useful with the disclosed methods of analysis of patterns of expression of markers include a non-cancerous sample (e.g., normal ovarian tissue), a sample from a subject prior to development of a cancer or at an earlier stage of the cancer, and a cell line (e.g., immortalized ovarian epithelial cells, such as IOSE cells) considered to display wild-type expression levels of the markers. In some embodiments, a reference RNA is arbitrarily chosen, but used consistently in relation to all tumor samples.

[0121] A subject is a living multi-cellular vertebrate organisms, a category that includes both human and non-human mammals.

[0122] A therapeutic agent, as used in a generic sense, is a composition used for treating a subject, such as a pharmaceutical or prophylactic agent.

[0123] A transformed cell is a cell into which has been introduced a nucleic acid molecule by molecular biology techniques. As used herein, the term transformation encompasses all techniques by which a nucleic acid molecule might be introduced into such a cell, including transfection with viral vectors, transformation with plasmid vectors, and introduction of naked DNA by electroporation, lipofection, and particle gun acceleration.

[0124] Treating a disease includes inhibiting or preventing the partial or full development or progression of a disease (e.g., ovarian cancer), for example in a person who is known to have a predisposition to a disease. An example of a person with a known predisposition is someone having a history of breast or ovarian cancer in his or her family, or who has been exposed to factors that predispose the subject to a condition, such as exposure to radiation. Furthermore, treating a disease refers to a therapeutic intervention that ameliorates at least one sign or symptom of a disease or pathological condition, or interferes with a pathophysiological process, after the disease or pathological condition has begun to develop.

[0125] In some aspects, a more aggressive treatment may be selected if warranted. By way of example, if a subject is found to have a BRCA1-like or BRCA2-like gene expression pattern, a more aggressive treatment, such as chemotherapy, radiotherapy, or surgical removal of the affected tissue and/or surrounding area may be selected.

[0126] A tumor is an abnormal mass of tissue, or neoplasm that may be either malignant or non-malignant. “Tumors of the same tissue type” refers to primary tumors originating in a particular organ (such as breast, ovary, bladder or lung). Tumors of the same tissue type may be divided into tumor of different sub-types, for example ovarian carcinomas can be further classified based on tumor histology as adenocarcinoma, serous, endometrial, clear cell or mixed. Tumors may also be classified according to a genetic abnormality associated with the development of that type of tumor. By way of example, a tumor associated with a defect in tumor suppressor genes BRCA1 or BRCA2 is referred to herein as a “BRCA1- or BRCA2-linked” tumor. As described herein, a sporadic ovarian tumor is a tumor arising for a reason other than a mutation in BRCA1 or BRCA2. However, the similarities in the pattern of expression of ovarian cancer markers in sporadic tumors to those in BRCA1-linked and BRCA2-linked tumors can be used to classify sporadic tumors into “BRCA1-like” or “BRCA2-like” tumors, using the methods of the disclosure. A “non-BRCA-type” tumor is one that has a pattern of expression of ovarian cancer markers unlike a BRCA1-like or BRCA2-like tumor.

[0127] A vector is a nucleic acid molecule as introduced into a host cell, thereby producing a transformed host cell. A vector may include nucleic acid sequences that permit it to replicate in the host cell, such as an origin of replication, and may also include one or more therapeutic genes and/or selectable marker genes and other genetic elements known in the art. A vector can transduce, transform, or infect a cell, thereby causing the cell to express nucleic acids and/or proteins other than those native to the cell. A vector optionally includes materials to aid in achieving entry of the nucleic acid into the cell, such as a viral particle, liposome, protein coating or the like.

[0128] Unless otherwise explained, all technical and scientific terms used herein have the same meaning as commonly understood by one of ordinary skill in the art to which this invention belongs. The singular terms “a,” “an,” and “the” include plurals unless the context clearly indicates otherwise. Similarly, the word “or” is intended to include “and” unless the context clearly indicates otherwise. “Comprises” means “includes.” It is further to be understood that all base sizes or amino acid sizes, and all molecular weight or molecular mass values, given for nucleic acids or polypeptides are approximate, and are provided for description. Although methods and materials similar or equivalent to those described herein can be used in the practice or testing of the present invention, suitable methods and materials are described below. All publications, patent applications, patents, and other references mentioned herein are incorporated by reference in their entirety. In case of conflict, the present specification, including explanations of terms, will control. In addition, the materials, methods, and examples are illustrative only and not intended to be limiting.

III. Description of Several Specific Embodiments

[0129] Provided herein are methods of diagnosing or prognosing development or progression of ovarian cancer in a subject, which methods involve detecting altered expression of at least one marker (e.g., a nucleic acid molecule such as one listed in Table 1 or genes, cDNAs or other polynucleotide molecules comprising one of the listed sequences, or a fragment thereof, or a protein, such as one encoded by such a nucleic acid molecule, or fragment of such protein). In certain embodiments, altered expression is detected in more than marker, for instance in at least 50, at least 100, at least 200, or at least 400 or more nucleic acid molecules listed in Table 1, or encoded for by a nucleic acid molecule listed in Table 1. In certain specific embodiments, no more than the molecules listed in Table 6, Table 7, Table 8, Table 9, Table 10 or Table 11 are included in such analysis.

[0130] Additionally provided herein are methods for the classification of ovarian tumors as BRCA1-like, BRCA2-like or non-BRCA-like tumors based upon expression profiles of selected markers. Using the expression profile data, multiple types of comparisons can be made to provide qualitative and quantitative information about the tumor type. Non-limiting examples of such comparisons include visual examination of color profiles of hierarchically clustered markers on a cDNA microarray, multidimensional scaling to the determine relative distance of the analyzed markers, and compound covariate prediction analysis to statistically classify a given tumor into one of two classes based upon the logarithmic expression ratio of the expression of at least one known classifying marker. In a specific non-limiting example, logarithmic expression ratios are generated and used to classify tumor types by comparing to markers known to have a logarithmic expression ratio associated with BRCA1-like, BRCA2-like or non-BRCA-like tumors (see Example 4).

[0131] Also encompassed herein are arrays containing two or more disclosed markers. Certain of such arrays are nucleic acid arrays that contain at least one marker, for instance at least one or more, such as 5, 10, 15, 25, 50, 100, 150, 200, 250, 300, 350, 400 or more nucleic acid molecules listed in Table 1 (or genes, cDNAs or other polynucleotide molecules comprising one of the listed sequences, or a fragment thereof), or a fragment of such protein, or an antibody specific to such a protein or protein fragment. Such arrays can also contain any particular subset of the nucleic acids (or corresponding molecules) listed in Tables 1-11 or all of those nucleic acids. Certain arrays (as well as the methods described herein) also may include nucleic acid molecules that are not listed in Table 1.

[0132] Certain of the encompassed methods involve measuring an amount of the ovarian cancer-related molecule in a sample (such as a serum or tissue sample) derived or taken from the subject, in which a difference (for instance, an increase or a decrease) in level of the ovarian cancer-related molecule relative to a standard such as a sample derived or taken from the subject at an earlier time, is diagnostic or prognostic for development or progression of ovarian cancer.

[0133] In some embodiments, altered expression of ovarian cancer-related nucleic acid molecules is detected using, for instance, in vitro nucleic acid amplification and/or nucleic acid hybridization. The results of such detection methods can be quantified, for instance by determining the amount of hybridization or the amount of amplification of the nucleic acid molecules.

[0134] Specific embodiments of methods for detecting altered expression of at least one ovarian cancer-related molecule use the arrays disclosed herein. Such arrays may be nucleotide (e.g., polynucleotide or cDNA) or protein (e.g., peptide, polypeptide, or antibody) arrays. In such methods, an array may be contacted with polynucleotides or polypeptides (respectively) from (or derived from) a sample from a subject. The amount and/or position of expression of the subject's polynucleotides or polypeptides then can be determined, for instance to produce a gene expression profile for that subject. Such gene expression profile can be compared to another gene expression profile, for instance a control gene expression profile from a subject having a known ovarian cancer-related condition. Similarly, protein arrays can give rise to protein expression profiles. Both protein and gene expression profiles can more generally be referred to as expression profiles. Expression profile data can be used to generate logarithmic expression ratios for use in compound covariate prediction analysis.

[0135] Other embodiments are methods that involve providing nucleic acids from the subject; semi-quantitatively amplifying the nucleic acids to form nucleic acid amplification products using primers; quantifying the amount of the nucleic acid amplification products; and comparing results to expression levels obtained using cDNA microanalysis. The sequence of such primers may be selected to bind specifically to a nucleic acid molecule listed in Table 1, or a nucleic acid molecule represented by those listed in Table 1. In specific examples of such methods, the primers are selected to amplify a nucleic acid product encoding topoisomerase II (TOP2A) (SEQ ID NO: 448), regulator of G-protein signaling 1 (RGS1) (SEQ ID NO: 398), invariant gamma-chain-associated protein (CD74) (SEQ ID NO: 89-91), epididymis-specific, whey-acidic protein (HE4) (SEQ ID NO: 60), major histocompatibility complex, class II, DR beta 1 protein (HLA-DRB1) (SEQ ID NO: 87-88), or zinc finger protein (ZFP36) (SEQ ID NO: 167-168).

[0136] Also encompassed are methods of ovarian cancer therapy, in which classification of a tumor of a patient into a BRCA1-like, BRCA2-like or non-BRCA-like tumor type aids in the selection of a treatment regimen. In some examples, the treatment selected is specific and tailored for the subject, based on the analysis of that subject's profile for one or more ovarian cancer-related molecules.

[0137] Other embodiments are kits for classifying tumors into a BRCA1-like, BRCA2-like or non-BRCA-like tumor class, which kits may include a binding molecule that selectively binds to the marker that is the target of the kit. In some examples of such kits where the marker is an ovarian cancer-related protein, the binding molecule provided in the kit may be an antibody or antibody fragment that selectively binds to the target ovarian marker protein. In other examples of such kits where the ovarian cancer-related marker level is a nucleic acid, the binding molecule provided in the kit may be an oligonucleotide capable of hybridizing to the nucleic acid marker molecule.

[0138] Further embodiments are methods of screening for a compound useful in treating, reducing, or preventing ovarian cancer or development or progression of ovarian cancer. Such methods involve determining if a test compound alters the gene expression profile of a subject (or cells of an in vitro assay) so that the profile more closely resembles a wild-type expression profile than it did prior to such treatment, and selecting a compound that so alters the gene expression profile. In specific examples of such methods, the test compound is applied to a test cell. In some of such methods, the profile is determined or measured in an array format.

[0139] Also encompassed are compounds selected using the methods described herein, which are useful in treating, reducing, or preventing ovarian cancer or development or progression of ovarian cancer.

[0140] Also disclosed herein are uses of identified target ovarian cancer-related molecules for the development of antibodies, including therapeutic antibodies that affect an ovarian cancer-related pathway. It is also envisioned that the disclosed ovarian cancer-related molecules can be used as vaccines, for instance as “cancer vaccines” to elicit an immune response from a subject that renders the subject more resistant to developing or progressing through a stage of ovarian cancer.

IV. Gene Expression Profiling of Ovarian Cancer Tumor Tissue Using Disclosed Markers

[0141] The present disclosure concerns gene expression profiling of ovarian tumor tissue from a subject for use in diagnosing, prognosing, staging, preventing, and treating the disease. Measurement of expression of genes within a tissue sample provides information regarding proteins that may be active during cancer mechanisms. Hence, the gene expression profile of tumor tissue may be compared against the profile for known markers for ovarian cancer, such as those disclosed herein (see Table 1).

[0142] Using the gene expression profile, an ovarian tumor from a subject may be classified into a BRCA1-like, BRCA2-like, or non-BRCA-like tumor. Because the prognosis for a patient having a BRCA1 or BRCA2 mutation is poorer than for patient having non-BRCA-like mutations, classification of tumors into these groups is helpful in selecting treatment strategies and aids a clinician in deciding whether to employ a more aggressive regimen in treating the patient, for instance radiotherapy, chemotherapy, or surgical removal of the affected tissue. In addition, classification of a sporadic tumor into a BRCA1-like or BRCA2-like classification may provide similar guidance in treating the patient. For example, a subject who has a BRCA1-like or BRCA2-like sporadic tumor may be treated similarly to a subject who has a BRCA1-linked or BRCA2-linked tumor. The identification of BRCA1- or BRCA2-like sporadic tumors also allows tumors (or subjects) to be selected for specific drug regimens that are particularly effective with the associated mutation type.

[0143] The ovarian cancer-linked markers disclosed herein are believed to be useful as diagnostic or prognostic indicators of BRCA1-like, BRCA2-like and non-BRCA-like ovarian cancer. In addition, the markers are believed to be useful in applications for treating ovarian cancer as the basis of new therapeutic targets, for the development of new anti-cancer therapeutic compounds, and/or to select particularly appropriate existing treatments. For example, the expression levels of these markers can be examined to monitor the effectiveness of anti-cancer treatments where an increase in or decreased level of nucleic acid expression opposite of the ovarian cancer-indicative pattern disclosed herein indicates an effective anti-cancer treatment. Beyond use in generating an expression profile, certain of the identified genes or EST sequences provided herein arc believed to have individual use as cancer markers.

[0144] A. Generating Gene Expression Information and Logarithmic Expression Ratios.

[0145] cDNA microanalysis allows for simultaneous analysis of the expression of multiple genes within various tissue samples, and is therefore useful in generating gene expression profiles. To perform cDNA microarray analysis, RNA is isolated from a subject and cDNA is synthesized from the RNA according to standard methods (see Sambrook et al., Molecular cloning, a laboratory manual. 2^{nd} ed. Cold Spring Harbor Laboratory, Cold spring Harbor, N.Y., 1989). Relative over-expression of the mRNA in the cancerous tissues can be measured against non-cancerous reference baselines (e.g., ovarian tissue from a subject not having ovarian cancer or an ovarian cell line, such as an immortalized ovarian cell line), to provide a framework for determining normal expression versus altered expression (genes that are either overexpressed or underexpressed). Nucleic acids that are overexpressed may be used as markers for ovarian cancer, while genes that are underexpressed may be putative tumor suppressors.

[0146] cDNA microarrays containing 7,651 sequence-verified features were constructed and applied to analyze the mRNA expression profile of sixty-one subjects with pathologically-confirmed epithelial ovarian adenocarcinoma having matched clinicopathologic features (see Alizadeh et al., Nature 403: 503-511, 2000; Perou et al., Nature 406: 747-752, 2000; Bubendorf et al., J. Natl. Cancer Inst., 91(20): 1758-64, 1999; Welsh et al., Proc Natl Acad Sci. USA 98: 1176-1181, 2001). These included eighteen cases linked to BRCA1 founder mutations, sixteen cases linked to BRCA2 founder mutations, and 27 cases negative for any founder mutations (e.g., sporadic ovarian epithelial cancer). These samples were compared to expression levels of these same features in an immortalized normal ovarian surface epithelium cell line (IOSE). Statistical tools, including a modified F-test with P<0.0001 considered significant (e.g., a 99.99% confidence level) were then used to analyze the data (e.g., to differentiate gene expression profiles associated with ovarian cancer), enabling a comprehensive, genomics-based analysis of the mRNA expression profiles of these ovarian cancer subjects.

[0147] The logarithmic expression ratios for the spots on each array were normalized by subtracting the median log ratio for the same array. Data were filtered to exclude spots with size less than 25 μm, intensity less than two times background or less than 300 units in both red and green channels, and any flagged or missing spots. In addition, any features found to be missing or flagged in greater than 10% of the arrays were not included in the analysis. Application of these filters resulted in the inclusion of 6,445 of the total 7,651 features in subsequent analyses. Statistical comparison between tumors groups was performed using the “BRB Array Tools” software (developed by Dr. Richard Simon and Amy Peng, Biometrics Research Branch, Division of Cancer Treatment and Diagnosis, NCI, USA), consisting of a modified F-test with P<0.0001 (99.99% confidence level) considered significant (see Example 4). This stringent P value is selected in lieu of the Bonferroni correction for multiple comparisons, which was deemed excessively restrictive (see Bland and Altman, B.M.J.: 310: 170, 1995). See Example 4 for an example of how an ovarian tumor is analyzed using the disclosed methods.

[0148] In addition to statistical analysis, multidimensional scaling (MDS) and hierarchical clustering techniques using a correlation metric and average linkage were used for evaluating overall gene expression. Using these techniques, a large set of genes and other encoding sequences (e.g., expressed sequence tags, ESTs) have been identified (Table 1), the expression of which varies in subjects having ovarian cancer (see Addendum). Other confidence levels could be used to select ovarian cancer-related molecules, such as 98%, 95%, 90%, 85%, and so forth (see Jain et al., IEEE Transacations on Pattern Analysis and Machine Intelligence 22(1): 4-37, 2000). Molecules identified as being linked to ovarian cancer (referred to generally herein as ovarian cancer-related molecules) using the methods described herein can be arranged on arrays for use in diagnostic and prognostic methods. Specific arrays are contemplated that are constructed using molecules identified at differing confidence levels. Specific examples of such arrays include arrays that detect altered expression of at least 2, 5, 10, 20, 30, or 50 of these molecules.

[0149] B. Comparison of Ovarian Epithelial Adenocarcinoma Cells to Immortalized Ovarian Surface Epithelium Cells

[0150] In a comparison of ovarian epithelial adenocarcinoma cells to immortalized ovarian surface epithelium cells, the largest contrast in gene expression was observed between BRCA1- and BRCA2-linked tumors, with multiple genes showing significant differences in expression levels. This group of genes was also able to segregate the sporadic tumors into two major “BRCA1-like” and “BRCA2-like” subgroups, indicating that BRCA-related pathways are also involved in sporadic ovarian cancers. In addition, two previously unreported gene expression patterns were noted. First, six of the genes differentially expressed between BRCA1-linked and sporadic tumors map to Xp11.23 and all exhibited higher mean expression levels in the BRCA1-linked samples [WAS (SEQ ID NO: 524-526), EBP (SEQ ID NO: 529), SMC1L1 (SEQ ID NO: 529), PCTK1 (SEQ ID NO: 527-528), ARAF1 (SEQ ID NO: 531-532), and UBE1 (SEQ ID NO: 533), see FIG. 3]. Second, compared to immortalized ovarian surface epithelium cells, several interferon-inducible genes were noted to be overexpressed in the majority of all tumor samples [SIAT1 (SEQ ID NO: 73), TNFSF10 (SEQ ID NO: 104-106), ABCB1 (SEQ ID NO: 164-166), CP (SEQ ID NO: 83-84), HLA-DRB5 (SEQ ID NO: 85-86), HLA-DRB1 (SEQ ID NOS: 87-88, 100, 101-103), CD74 (SEQ ID NO: 92-93), HLA-DRA (SEQ ID NO: 94-96), HLA-DPA (SEQ ID NO: 97-99), IFITM1 (SEQ ID NOS: 50-51, 52-54), IFITM2 (55-57, 58-59), A2M (SEQ ID NO: 193-195), G1P3 (68-69), 1GKC (SEQ ID NOS: 112-114, 115-116), SCYB10 (SEQ ID NO: 120-121), Col3A1 (SEQ ID NO: 141-143), HLA-B (SEQ ID NO: 154-156), and HLA-C (SEQ ID NO: 157-159), see FIG. 4]. In terms of overall differential gene expression, BRCA1 and BRCA2-linked tumors express genes more different from each other than from sporadic (non-BRCA-linked) tumor samples.

[0151] The identified ovarian cancer-related genes represent putative mediators of ovarian cancer, and as such are candidate targets for the development of novel therapeutics for the treatment of ovarian cancer using conventional techniques. By way of example, a candidate drug, targeted at restoring expression of a gene of the disclosure, could be examined using cDNA microarray analysis for utility in influencing growth of ovarian cancer cells. Thus, use of cDNA microarray techniques for genomics-based discovery of genes variably expressed during ovarian cancer provides for the identification of novel therapeutic targets for treatment of ovarian cancer.

[0152] It is contemplated that certain of the ovarian cancer markers identified herein encode or correspond to soluble proteins, while others encode or correspond to membrane associated or membrane integral proteins, some of which are exposed at least to a certain extent on the exterior of a cell in which they are expressed. In some embodiments, those ovarian cancer-related molecules that are expressed at or on the surface of a cell are selected as therapeutic targets, for instance for targeting with an antibody-based therapy, which is facilitated by the access of the ovarian cancer-related molecule to the extracellular matrix. These ovarian cancer markers may be described as being “drug accessible.” In addition, such soluble ovarian cancer markers, if secreted, may be detected in a blood or serum sample from the subject.

[0153] C. Comparison of Ovarian Epithelial Cancer Cells to Normal Postmenopausal Ovarian Samples.

[0154] cDNA microarrays containing 7,600 sequence-verified features were constructed and applied to analyze the mRNA expression profile of 61 subjects with ovarian epithelial cancer as compared to two normal postmenopausal ovarian samples.

[0155] Gene expression in each sample (normal or tumor) was directly compared to a “reference RNA” consisting of a mix of nine different human cell lines (breast adenocarcinoma, hepatoblastoma, cervical adenocarcinoma, testicular embryonal carcinoma, glioblastoma, melanoma, liposarcoma, histiocytic lymphoma, T cell lymphoblastic leukemia, and plasmacytoma/myeloma, Stratagene, La Jolla, Calif.). The raw gene expression data was used to calculate the logarithmic expression ratio for each gene. The logarithmic expression ratios (“log ratio”) obtained from this comparison were then normalized and statistically compared to one another, providing for indirect comparison of gene expression in tumors and normal ovarian samples. This was accomplished by scoring the magnitude of differential expression of each gene (between normal and cancer samples) according to the formula:

$$\frac{\begin{matrix}( average cancer log ratio - \\ average normal log ratio )\end{matrix}}{\begin{matrix}( standard deviation cancer + \\ standard deviation normal )\end{matrix}} = \begin{matrix}magnitude of differential \\ expression\end{matrix}$$

In genes showing a large mean expression difference between normal and cancerous samples, the magnitude of differential expression has a greater value, while the intra-group variability in expression ratios is low.

[0156] Genes were then ranked according to the magnitude of differential expression and the highest-ranking genes were considered to be the best candidates for differentiating normal from malignant ovarian samples (see Furey et al., Bioinformatics 16(10): 906-14, 2000).

[0157] Using these techniques, a large set of genes and other encoding sequences (e.g., ESTs) that are under-expressed in subjects having ovarian cancer have been identified (see Table 4). These under-expressed ovarian cancer markers represent putative tumor suppressors, and as such are candidate targets for the development of novel therapeutics for the treatment of ovarian cancer using conventional techniques. By way of example, induction of expression of one or more of these markers through therapeutic means (e.g., induction by a drug or gene therapy) may inhibit tumor growth and/or increase tumor cell death, for instance through stimulation of apoptotic pathways.

[0158] Furthermore, a large set of genes and other encoding sequences (e.g., ESTs) have been identified (see Table 5), the expression of which is overexpressed in subjects having ovarian cancer. These overexpressed ovarian cancer markers represent putative mediators of ovarian cancer, and as such are candidate targets for the development of novel therapeutics for the treatment of ovarian cancer using conventional techniques. Over-expression of one or more such markers can also be detected in the body (for example using a serum test to detect or monitor progression of ovarian cancer).

[0159] In addition, six of the markers identified herein (e.g., WAS (SEQ ID NO: 524-526), PCTK1 (SEQ ID NO: 527-528), UBE1 (SEQ ID NO: 533), SMC1L1 (SEQ ID NO: 529), ARAF1 (SEQ ID NO: 531-532), and EBP (SEQ ID NO: 529)) have all been mapped to chromosome Xp11 (see Example 1). Hence, this chromosome could contain additional genes and ESTs that may be useful as markers for prognosing, diagnosing and monitoring ovarian cancer. The methods of the disclosure can be used to find additional genes and ESTs in this region for use as ovarian cancer markers.

V. Methods of Classifying Tumors into Subgroups

[0160] Disclosed herein are multiple methods of classifying tumors into subtypes based upon the expression of disclosed ovarian tumor markers (see Table 1).

[0161] A. Comparison of Raw Expression Data

[0162] The expression data of one or more ovarian cancer markers can be compared between samples and analyzed to detect differences in expression between the markers. The expression of an individual marker can be stated in ratio or “fold” form relative to the expression of the standard. For instance, in Table 4, the average logarithmic ratio of the gene expression for the standard (“normal”) for ITM2A (SEQ ID NO: 202) is 1.145, while the average logarithmic ratio of the gene expression in cancer cells was −2.036. These numbers can be compared to derive a value for the difference in expression by calculating the expression ratio of each number, and dividing the expression ratio for the average log cancer value by the expression ratio for the average log normal value. Hence:
Expression ratio of average log normal: 2^{1.145}=2.211
Expression ratio of average log cancer 2^{-2.036}=0.244
Ratio (cancer to normal)=(0.244)/(2.211)=0.110

[0163] Thus, ITM2A is under-expressed in cancer by a ratio of 0.110 to 1 (i.e., in ovarian cancer tissue, ITM2A expresses at approximately 10% of the expression level seen in wild-type cells).

[0164] Collections of such data can be assembled to provide a gene expression profile, as discussed above. With such profiles, the standard deviation of the expression ratio of each gene can be measured by obtaining the square root of the variance of the expression data as described by Jaccard and Becker (in Statistics for the Behavioral Sciences, 2^{nd} ed., Wadsworth Publishing Co., Belmont, Calif., 1990) and Myers and Well. (in Research Design and Statistical Analysis, University of Massachusetts, Amherst, Mass., 1995).

[0165] Further analysis can include a Student's t-test, to determine if the mean expression of two groups (e.g., BRCA1-like and non-BRCA-like, BRCA2-like and non-BRCA-like, etc.) are statistically different from each other.

[0166] Due to the range over which genes may express, it may be useful to perform statistical analyses using the logarithmic expression value for each marker (see Example 1). However, calculations using the logarithmic expression values may dilute the ability of certain analyses to determine differences. Hence, it may be useful to employ multiple methods of analysis to ascertain relative values in expression (see Jain et al., IEEE Transacations on Pattern Analysis and Machine Intelligence 22(1): 4-37, 2000).

[0167] B. Visual Analysis of Hierarchical Clustering

[0168] Methods disclosed herein include hierarchical clustering analysis of genes with statistically significant differential expression between sets of tumor groups. Hierarchical clustering can be used to cluster objects (e.g., genes, such as the ovarian cancer markers listed in Table 1) to represent relationships among the objects. The relationships are represented, for example by a tree whose branch lengths reflect the degree of similarity between the objects (see e.g., FIG. 2B).

[0169] Optionally, hierarchical clustering can be combined with a graphical representation of the primary data by representing each data point with a color that quantitatively and qualitatively reflects the original experimental observations. The use of color representations, along with statistical organization, provides a graphical display that provides visual information about expression of the genes. Hence, the methods disclosed herein can provide visual information regarding degrees of similarity (e.g., patterns of under-expression or over-expression) between assessed genes in different samples, for instance in samples of BRCA1-linked, BRCA2-linked and sporadic ovarian tumor samples (see FIG. 2B).

[0170] At the first iteration, each object is considered to be its own group, and the pair of objects with the smallest distance between them is merged into a new group. Each subsequent iteration merges two groups to form a new group, until finally all objects end up merged into a single group. The classification tree, or dendrogram, graphically represents the sequence of clusters formed at each iteration of merges, as well as the distance between clusters at each merge (here, FIG. 2). This technique is widely employed to represent gene expression information obtained from microarray experiments (see Eisen et al., Proc. Natl. Acad. Sci. U.S.A. 95(25): 14863-8, 1998).

[0171] The gene expression data disclosed herein were analyzed by calculating the Pearson correlation coefficient to obtain a gene expression similarity metric. To describe, Gi is (log-transformed) primary gene expression data for gene G in each tumor sample, represented as variable i. For any two genes X and Y observed over a series of N tumor samples, a similarity score can be computed as follows:

$$S ( X , Y ) = \frac{1}{N} {\sum }_{i = 1 , N} ( \frac{{X}_{i} - {X}_{offset}}{{Φ}_{X}} ) ( \frac{{Y}_{i} - {Y}_{offset}}{{Φ}_{Y}} )$$

$$where$$

$${Φ}_{G} = \overline{{\sum }_{i - 1 , N} \frac{{( {G}_{i} - {G}_{offset} )}^{2}}{N}} .$$

[0172] When G_{offset} is set to the mean of the gene expression levels of the tumor samples for gene G, then Φ_{G} becomes the standard deviation of G, and S(X, Y) is exactly equal to the Pearson correlation coefficient of the gene expression levels for genes X and Y. Values of G_{offset} that are not the average of the gene expression levels for gene G are used when there is an assumed unchanged or reference state (e.g., the gene is not over-expressed or under-expressed) represented by the value of G_{offset}, against which changes are to be analyzed; in all of the examples presented here, G_{offset} is set to 0, corresponding to a fluorescence ratio of 1.0.

[0173] By way of example, FIGS. 2A and 2A′ demonstrate that expression of the disclosed markers can be used to visualize different tumor types. Hierarchical clustering was performed using with a Pearson correlation metric and average linkage were used for evaluating overall gene expression for the sixty-one BRCA1-linked, BRCA2-linked and sporadic tumors (see Example 1). When applicable, all statistical tests were two-sided.

[0174] In FIG. 2, B2 represents BRCA2-linked tumors, and B1 represents BRCA1-linked tumors. The red and green intensities represent standard normal deviation (Z score) values from each marker's means expression level (represented as black) across the sixty-one tumors samples. Red represents increased expression and green represents decreased expression. The differences in gene expression can be appreciated by looking at the groupings apparent in FIG. 2A. The genes in the left half of the FIG. 2A are from BRCA2-linked tumors and the genes in the right half are from BRCA1-linked tumors. As can be seen with casual observation, gene expression between these two tumor groups differs relative to the control (IOSE cells). Specifically, BRCA2-linked tumors contain under-expressing genes that correlate to these genes in the upper left and lower right quadrants of FIG. 2A, which are represented as primarily green in color. Furthermore, the genes in the upper right and lower left quadrant, which are represented as primarily red in color, correlate to genes that are generally over-expressed relative to the control IOSE cells. Hence, hierarchical clustering can be used to qualitatively visualize differences in the expression patterns of samples.

[0175] C. Multidimensional Scaling

[0176] Multidimensional scaling is a dimension reduction procedure that can be used for visualization purposes. Each experiment can be represented by its expression profile, which is a K-dimensional vector of log-ratios, where K is the number of clones represented after filtering. The multidimensional scaling procedure reduces each experiment's expression profile from K-dimensional space to 3-dimensional space, by attempting to preserve distances between the N experiment vectors. The distance metric needs to be specified when using the multidimensional scaling tool. First, the N×N distance matrix is computed, which quantifies the relationships between the N experiments in the series of chips. For each of the N vectors in K-dimensional space, the multidimensional scaling procedure finds a vector in 3-dimensional space, such that the N×N distance matrix computed in 3-dimensional space approximates the N×N distance matrix computed in K-dimensional space. The relationships between the N experiments can then be visualized by plotting the N vectors in 3-dimensional space, in which each of the N points represents a single experiment. A rotating 3-dimensional visualization tool can be used for discovery of experiment clusters.

[0177] By way of example, the gene expression data of 6445 filtered genetic elements of the sixty-one ovarian tumor samples (see Example 1) was used in multidimensional scaling to generate a 3-D diagram for visualization of the respective differences between the expression patterns of each tumor sample. As seen in FIG. 1, the data segregate into different areas of the 3-D space based on similarities in gene expression within the tumor type. In particular, the BRCA1-linked tumors (dark circles) segregate higher into the cube than the BRCA2-linked tumors (open circles). The sporadic tumor samples (asterisks) also fell into higher and lower areas of the cube, indicating that they segregate into BRCA1-type and BRCA2-type expression patterns. Thus, multidimensional scaling can be used to make a qualitative distinction regarding the expression patterns of these samples.

[0178] Multidimensional scaling can be used to qualitatively assess the expression pattern of an unknown tumor type. Expression data for a plurality of BRCA1-type and BRCA2-type markers is generated using the tumor tissue (for instance, on a cDNA microarray) relative to a standard ovarian tissue (e.g., from a subject not having ovarian cancer, immortalized ovarian epithelial cells, etc.), and logarithmic ratios of the gene expression data are calculated. To compare the pattern of expression of the plurality of the known BRCA1-type and BRCA2-type markers to the unknown ovarian sample, the K-dimensional vectors of the logarithmic expression ratios for all expression data are calculated as discussed above. Next, the K-dimensional vectors are plotted in a 3-dimensional space and the layout of the data compared. Similar to FIG. 1, the unknown sample data should cluster either near the BRCA1-like or BRCA2-like tumors, or alone (which would indicate that it is a non-BRCA-like tumor). Hence, multidimensional scaling can be used to make a qualitative distinction regarding the expression patterns of an unknown samples in comparison to known BRCA1-type and BRCA2-type markers. In addition, more than one unknown sample can be used in this analysis.

[0179] D. Compound Covariate Predictor Analysis

[0180] Segregation into tumor types can be performed using compound covariate predictor analysis, which creates a multivariate predictor for one of two classes to each sample (see Example 4). Markers included in the multivariate predictor are those that are univariately significant at the selected significance cutoff (e.g., P<0.0005). The multivariate predictor is a weighted linear combination of log-ratios (or log intensities for single-channel arrays) for genes that are univariately significant. The weight consists of the univariate t-statistics for comparing the classes, and is calculated using the equation:
CCP=Φᵢtᵢ*(xᵢ−mᵢ)
where tᵢ=t-value for gene i (see Table 10), xᵢ=logarithmic ratio of the gene expression (i) in the new sample to be classified, and mᵢ=midpoint between the two classes for gene i (see Table 10). The index i runs over all the genes that are significant in the original analysis (i.e. all 62 genes in Table 10). If the log ratio xᵢ is missing for gene i in the new sample to be classified, then it should be assigned as mᵢ for that gene, to cause the result of the calculation to be zero for that gene. If the compound covariate predictor value is positive, then the tumor classified as one of the first type (e.g., BRCA1-like). If the compound covariate predictor value is negative, then the tumor is classified as belonging to the second type (e.g., BRCA2-like).

[0181] A second method of tumor classification using a compound covariate predictor model can be found in Radmacher et al., “A paradigm for class prediction using gene expression profiles,” found on the National Cancer Institute Internet website. This publication is expressly incorporated by reference herein.

[0182] In order to determine whether a tumor is classified as BRCA1-like or BRCA2-like using a single markers in Table 10, the following steps are used:
[0183] 1. Gene expression information is obtained, for instance on a cDNA microarray, using the same standard (e.g., IOSE cells) that was used to obtain the marker data.
[0184] 2. The gene expression data is converted into a logarithmic ratio using log base 10. Hence, a tumor that has a gene expression value for gene KIAA00008 of 0.45 would have a log base 10 ratio of −0.346.
[0185] 3. The midpoint value of Table 10 is subtracted from the logarithmic ratio, and multiplied by the t-value for KIAA00008 for the data set. Thus,
   [(−0.346)−(−0.431)]*(−8.0421)=−0.51.

[0186] The values for the average logarithmic ratio for BRCA1-linked and BRCA2-linked values in the data set are then consulted. The obtained value will fall between the midpoint and one of these values because genes in which larger values of the logarithmic ratio are assigned to one class (e.g., BRCA1-linked) will have weights of a value that is more negative with respect to the midpoint value (e.g., −0.56864), whereas genes in which larger values of the logarithmic ratios are assigned to the other class (e.g., BRCA2-linked) will have weights of a value that is more positive with respect to the midpoint value (e.g., −0.29414). Hence, the obtained value, 0.1930, would fall on the more negative side of this data, and would therefore be classified as a BRCA2-like data set.

[0187] If this same analysis is performed using multiple markers, the method remains the same except that the data can be summed prior to performing the analysis. This method is a multivariate approach of the compound covariate analysis, and can be used to determine whether the pattern of expression of an unknown tumor is similar to a BRCA1-like or BRCA2-like pattern of expression.

[0188] Further analysis, such as a “leave-one-out” approach may additionally be employed to test the ability of the Compound Covariate Predictor to classify the tumors into additional subtypes, such as resistance to a therapeutic compound. See Radmacher et al., “A paradigm for class prediction using gene expression profiles,” found on the National Cancer Institute Internet website.

[0189] E. Comparisons Using Databases

[0190] Due to the large amount of information associated with the analysis methods disclosed herein, it may be particularly useful to construct and/or consult databases of information for use in the analysis.

[0191] By way of example, the information generated by the methods of the disclosure can be stored in databases, such as a database of a plurality of markers known to express differently in BRCA1-like and BRCA2-like tumors (e.g., Table 9). Such databases may be made publicly available, such as the Stanford Microarray Database (maintained by Stanford University, see Sherlock et al., Nucleic Acids Res., 29(1): 152-155, 2001). These databases may be used to store reference data for use with the classification methods of the disclosure. In addition, such databases can be used to provide information regarding markers of potential use in diagnosing, prognosing, or monitoring ovarian cancer, for use by clinicians.

[0192] The use of databases to search for stored information is disclosed in U.S. Pat. Nos. 5,871,697 and 6,519,583 the methods of which are expressly incorporated herein.

VI. Kits for Measuring the Level or Function of Ovarian Cancer-Related Molecules.

[0193] The nucleic acid sequences and ESTs disclosed herein can be supplied in the form of a kit for use in detection or monitoring ovarian cancer. In such a kit, one or more of the nucleic acid sequences and/or ESTs in Table 1 are provided in one or more containers, or in the form of a microarray. The kit may also contain reagents for use in preparing a biological sample of a subject for screening with the kit. The container(s) in which the reagent(s) and microarray(s) are supplied can be any conventional container that is capable of holding the supplied form, for instance, plastic boxes, microfuge tubes, ampoules, or bottles. In some applications, negative controls obtained from a subject free from ovarian cancer may be provided in pre-measured (e.g., single use) amounts in individual, typically disposable, tubes or equivalent containers. With such an arrangement, the sample to be tested for the presence of ovarian cancer can be added to the testing container and tested directly.

[0194] The amount/number of each testing reagent and container supplied in the kit can be any appropriate amount, depending for instance on the market to which the product is directed. For instance, if the kit is adapted for research or clinical use, the amount of each testing reagent and container provided would likely be an amount sufficient to screen several biological samples. Those of ordinary skill in the art know the amount of testing reagent that is appropriate for use in a single container. General guidelines may for instance be found in Innis et al. (PCR Protocols, A Guide to Methods and Applications, Academic Press, Inc., San Diego, Calif., 1990), Sambrook et al. (In Molecular Cloning: A Laboratory Manual, Cold Spring Harbor, N.Y., 1989), and Ausubel et al. (In Current Protocols in Molecular Biology, Greene Publ. Assoc. and Wiley-Intersciences, 1992).

[0195] A kit may include more than two nucleic acid sequences or ESTs, in order to facilitate screening of a larger number of ovarian cancer markers or tumor suppressors. For instance, the sequences set forth in Table 1, or a subset of (e.g., 5, 10, 15, 20, 50, 100, 150, 200, 250, 300, 350, 400 or more) of these sequences, may be provided. By way of example, a provided subset could include the markers set forth in Table 6, Table 7, Table 8, Table 9, or Table 10. These sets of sequences are provided by way of example only, and are not intended to be limiting examples.

[0196] In some embodiments of the current disclosure, kits may also include the reagents necessary to carry out screening reactions, including, for instance, RNA sample preparation reagents, appropriate buffers (e.g., polymerase buffer), salts (e.g., magnesium chloride), and secondary detection reagents (e.g., cyanine 5-conjugated dUTP).

[0197] Kits may in addition include either labeled or unlabeled sequences for use in detection of the expression levels.

[0198] Embodiments of the disclosure are illustrated by the following non-limiting Examples.

### EXAMPLE 1

### Identification of Genes with Altered Expression in Ovarian Cancer

[0199] This example describes how a first subset of the disclosed ovarian cancer-related nucleic acid molecules were identified. These ovarian cancer-related molecules show differences in expression in subjects having ovarian cancer compared to normal ovarian surface epithelial cells and are classified according to their BRCA-1, BRCA-2, and sporadic tumor status. The results of these studies have been published in Jazaeri et al., J. Natl. Cancer Inst., 94(13): 990-1000, 2002, which is incorporated by reference in its entirety herein.

Methods and Material:

[0200] Clinicopathologic characteristics of BRCA-linked and sporadic ovarian cancers: Sixty-one cases of pathologically-confirmed epithelial ovarian adenocarcinoma from the Memorial Sloan-Kettering Cancer Center were studied and screened for founder mutations. These included eighteen cases linked to BRCA1, sixteen cases linked to BRCA2, and twenty-seven sporadic cases. All patients were self-identified as Ashkenazi Jews and after informed consent underwent genotyping for germ-line founder mutations in BRCA1 (185delAG and 5382insC) and BRCA2 (6174delT) (see Boyd et al., JAMA: 283: 2260-2265, 2000). Those cases with a BRCA mutation were categorized as having hereditary ovarian cancer and those without such a mutation as having sporadic ovarian cancer.

[0201] Tumor samples: In order to minimize confounding variables, BRCA1-linked, BRCA2-linked, and sporadic tumors of similar stage, grade, and histology were selected from the sixty-one individuals studied [18 BRCA1 (185delAG, 5382insC), 16 BRCA2 (6174delT), 27 sporadic tumors). The majority of tumors in all three groups were characterized by advanced stage, moderate to high grade (grade 2 or 3), and a predominance of serous histology. Hence, the clinicopathologic parameters of selected samples were well-matched and in agreement with those reported previously for these tumors types (see Boyd et al., JAMA: 283: 2260-2265, 2000: Ramus et al., Genes Chrom. Cancer: 25: 91-96, 1999).

[0202] All tumor samples had been flash frozen, embedded in OCT medium, and stored at −80° C. Isolation of RNA was performed using the RNeasy columns (Qiagen, Valencia, Calif.) according to the manufacturer's instructions. The integrity of RNA was verified by denaturing gel electrophoresis. Total RNA was linearly amplified using a modification of the Eberwine method (see Van Gelder et al., Proc. Natl. Acad. Sci. U.S.A. 87: 1663-1667, 1990). Table 2 catalogs the clinicopathologic features of the tumor samples studied.

TABLE 2
Clinicopathologic features of tumor samples

| Variable | BRCA1-linked | | BRCA2-linked | | Sporadic | |
|---|---|---|---|---|---|---|
| Number of samples | 18 | | 16 | | 27 | |
| Median Age* (SD) | 50 | (11) | 60 | (9) | 69 | (11) |
| Stage | | | | | | |
| I | 2 | (11.1%) | 0 | | 0 | |
| II | 0 | | 2 | (12.5%) | 3 | (11.1%) |
| III | 11 | (61.1%) | 12 | (75%) | 24 | (88.9%) |
| IV | 5 | (27.8%) | 2 | (12.5%) | 0 | |
| Grade | | | | | | |
| 1 | 0 | | 0 | | 0 | |
| 2 | 4 | (22.2%) | 6 | (37.5%) | 8 | (29.6%) |
| 3 | 14 | (77.8%) | 7 | (43.8%) | 16 | (59.3%) |
| No. | 0 | | 3 | (18.7%) | 3 | (11.1%) |
| Histology** | | | | | | |
| Serous | 9 | (50%) | 12 | (75%) | 16 | (59.3%) |
| Endometrioid | 3 | (16.7%) | 0 | | 2 | (7.4%) |
| Mucinous | 0 | | 0 | | 0 | |
| Clear Cell | 2 | (11.1%) | 0 | | 0 | |
| Adenocarcinoma NOS | 3 | (16.7%) | 3 | (18.8%) | 9 | (33.3%) |
| other | 1 | (5.5%) | 1 | (6.2%) | 0 | |

*F test, P = .0002/Data are the median +/− standard deviation.
**Chi test P value for differences in histology among tumor groups = 0.17
NOS = not otherwise specified

[0203] cDNA Microarrays: The cDNA microarrays consisted of 7,651 total features representing different (non-redundant) genes, and were manufactured at the National Cancer Institute microarray facility.

[0204] Total RNA was reverse-transcribed by using a 63 nucleotide synthetic primer containing the T7 RNA polymerase binding site (5′-GGCCAGTGAATFGTAATACGACTCACTATAGGGAGGCGG(T)₂₄-3′ (SEQ ID NO: 1). Second strand cDNA synthesis (producing double-stranded cDNA) was performed with RNase H, Escherichia coli DNA polymerase 1, and E. coli DNA ligase (Invitrogen, Carlsbad, Calif.). After cDNA was blunt-ended with T4 DNA polymerase (Invitrogen, Carlsbad, Calif.), it was purified by extraction with a mixture of phenol, chloroform, and isoamyl alcohol and by precipitation in the presence of ammonium acetate and ethanol. The double-stranded cDNA was then transcribed using T7 polymerase (T7 Megascript Kit, Ambion, Austin, Tex.), yielding amplified antisense RNA that was purified using RNeasy mini-columns (Qiagen, Valencia, Calif.). Pooled total RNA from two SV40 immortalized ovarian surface epithelial cell-lines (IOSE) was amplified and used as reference for cDNA microarray analysis.

[0205] Four μg of amplified RNA was reverse transcribed and directly labeled using cyanine 5-conjugated dUTP (tumor RNA) or cyanine 3-conjugated dUTP (IOSE RNA, provided by Dr. Jeff Boyd, Memorial Sloan-Kettering). Hybridization was performed in a solution of 5×SSC and 25% formamide for 14-16 hours at 42° C. Slides were washed, dried, and scanned using an Axon 4000a laser scanner (Axon Instruments, Inc., Union City, Calif.).

[0206] Imaging and I.M.A.G.E. Analysis: Fluorescence intensities at the immobilized targets were measured by using an Axon GenePix Scanner and Genepix Pro 3.0 analysis software (Axon Instruments, Union City, Calif.). The raw data were then uploaded to a relational database maintained by the Center for Information Technology at the National Institutes of Heath. The cDNA clones are identified by their Integrated Molecular Analysis of Genomes and their Expression Consortium (I.M.A.G.E.) clone number.

[0207] Amplification of RNA: The first strand of RNA was synthesized, by adding 1-3 μg of total RNA into a reaction tube (e.g., Eppendorf, or other container of suitable size), adding 1 μl T7-(dT)₂₄ primer (2 μg/μl), and bringing to a volume of 20 μl with nuclease-free water. The reaction was incubated at 70° C. for 10 minutes, then spun briefly in a centrifuge and placed on ice. Four μl 5× first strand cDNA buffer was added, then 2 μl 0.1M DTT, 2 μl 10 mM dNTP mix (Amersham-Pharmacia, Piscataway, N.J. 08855-1327 USA), 1 μl RNasin (Promega, Madison, Wis. 53711 USA), and 2 μl Superscript II. The reaction was mixed well and incubated at 42° C. for 1 hour. The tube was centrifuged briefly, and placed on ice. To synthesize the second strand, 91 μl DEPC-treated water was added, then 30 μl second strand buffer, 3 μl10 mM dNTP mix, 4 μl DNA Polymerase I (10U/μl), 1 μl DNA Ligase (10U/μl), and 1 μl RNAse H (2U/jμl). The final reaction volume equaled 150 μl. Next, the tube was gently tapped to mix, then briefly centrifuged. The tube was incubated at 16° C. for two hours, then 2 μl (10U) T4 DNA Polymerase was added. The tube was cooled for five minutes at 16° C., then the reaction stopped with 10 μl of 0.5 M EDTA. Ten μl of 1M NaOH were added, then the reaction was incubated at 65° C. for 10 minutes. The solution was neutralized by addition of 25 μl Tris-HCl (pH=7.5).

[0208] Clean Up of Double Stranded cDNA: The Phase Lock Gel (PLG) was pelleted in a microcentrifuge at maximum speed for 30 seconds. 198 μl (equal volume) of (25:24:1) Phenol:chloroform:isoamyl alcohol (saturated with 10 mM Tris-HCl pH 8.0/1 mM EDTA) was added to the final DNA synthesis preparation (198 μl) to a final volume of 396 μl. The solution was mixed well by pipetting up & down vigorously. The entire cDNA-phenol/chloroform mixture was transferred to the PLG tube, and microcentrifuged at maximum speed for two minutes. The aqueous supernatant was transferred to a new 1.5 ml tube, and 1 μl linear acrylamide was added. 0.5 volumes of 7.5M Ammonium Acetate+2.5 volumes (include the added Ammonium Acetate) of 95% ethanol stored at −20 to the sample was added and the solution was vortexed, then centrifuged at maximum speed in a microcentrifuge at room temperature for 20 minutes. The supernatant was removed and the pellet was washed with 0.5 ml of 80% ethanol. The solution was centrifuiged at maximum speed for 5 minutes at room temperature. The 80% ethanol was poured off, and the 80% ethanol wash repeated. The pellet was air dried for approximately 15 minutes, then resuspended in 16 pi of nuclease-free water.

[0209] In Vitro Transcription: Using an Ambion T7 Megascript kit (Ambion, Austin, Tex. 78744-1832, USA), the manufacturer's instructions were followed to create a 40 μl reaction (i.e., the 20 μl standard reaction was doubled and incubated at 37° C. for 4-5 hours). The reaction was assembled at room temperature using 16 μl of template double-stranded DNA, to avoid the precipitation of spermidine, which can occur if done on ice. Four μl of 10× reaction buffer were added, then 4 μl of ATP solution (75 mM T7), 4 μl of CTP solution (75 mM T7), 4 μl of GTP solution (75 mM T7), 4 μl of UTP solution (75 mM T7), 4 μl of Enzyme Mix, and the reaction was incubated at 37° C. for 5-6 hours. Sixty μl nuclease-free water was added to bring the total volume up to 100 μl. The RNA was “cleaned” using the “RNA clean-up” protocol provided in the Qiagen RNeasy Mini Handbook, May 1999, pp. 48-49, Qiagen, Valencia Calif. RNA was eluted with 30 μl of nuclease-free water, and the optical density ratio was measured (the sample should have an optical density of greater than 1.8 when measured at 260/280 nanometers). The expected yield from this preparation was ten times the starting amount of total RNA, and the RNA was then ready for use in generating probe for microarrays using total RNA (see below).

[0210] Second Round Amplifications: 0.5-1.0 μg of amplified RNA were resuspended in 11 μl ultrapure water.

[0211] First Strand Synthesis: One μl Random hexamer (1 mg/ml) was added and the reaction was incubated at 70° C. for 10 minutes, then chilled on ice, then allowed to equilibrate at room temperature for 10 minutes. Four μl 5× First strand cDNA buffer, 2 μl 0.1M DTT, 2 μl 10 mM dNTP mix, 1 μl RNasin were added, and the reaction was mixed incubated at 42° C. for 2 minutes. Two μl Superscript II were added, and the reaction was mixed well and incubated at 42° C. for 1 hour. One μl RNAse H was added, and the reaction was incubated at 37° C. for 20 minutes, then heated to 95° C. for 2 minutes to quell the reaction, then chilled on ice.

[0212] Second Strand Synthesis: One μl T7-oligodT primer (0.5 mg/ml) was added, and the reaction was incubated at 70° C. for 5 minutes and at 42° C. for 10 minutes. Then, 91 μl DEPC treated H₂O were added, then 30 μl Second strand buffer, 3 μl10 mM dNTP mix, 4 μl DNA Polymerase I (10U/μl), 1 μl DNA Ligase (10U/μl), and 1 μl RNAse H (2U/μl) to a final volume of 150 μl. The tube was tapped gently to mix, then briefly centrifuged. The reaction was incubated at 16° C. for two hours, then 2 μl (10U) T4 DNA Polymerase were added, and the reaction was cooled for 5 minutes at 16° C. The reaction was stopped with 10 μl of 0.5 M EDTA, then 10 μl of 1M NaOH were added. The reaction was incubated at 65° C. for 10 minutes, then neutralized by addition of a solution with 25 μl Tris-HCl (pH=7.5). The protocol for “Clean Up of Double Stranded cDNA” and “In Vitro Transcription” was followed to generate cDNA for use in preparation of the probe for microarray hybridization.

[0213] Preparation of Probe and Microarray Hybridization Using Amplified RNA: To prepare the probe, reverse transcription labeling reaction mixes were created for each probe containing the component Random Primer (InVitrogen, Carlsbad, Calif. 92008, USA). Three μg/μl in 2 μl were added, then 5-6 μg amplified RNA. The reaction was brought to a final volume of 17 μl with water, then incubated at room temp for 10 minutes. To each probed, 5× first strand buffer in 8 μl, 20× lowT-dNTP mix in 2 μl, 0.1 M DTT in 4 μl, RNAsin in 1 μl, Cy-3 or Cy-5 dUTP (NEN Life Science, Boston, Mass. 02118-2512 USA) in 4 μl, and SuperScriptI] (GIBCO-BRL, InVitrogen Corporation, Carlsbad, Calif. 92008 USA) enzyme in 2 μl was added. The reaction was incubated at 42° C. for 60 minutes, then 5 μl of 500 mM EDTA and 10 μl of 1M NaOH were added. The reaction was incubated at 65° C. for 15 minutes to hydrolyze residual RNA, then cooled to room temperature. Twenty-five 25 μl of 1M Tris-HCl (pH7.5) was added to neutralize pH.

[0214] Probe Cleanup: 500 μl of 1×TE were added to a Microcon-YM30 column and the column was spun at 13,000 rpm for 5-6 minutes to wash the column. Membrane integrity was checked by looking into the top insert, to confirm that a thin film of TE (˜50 μl) covered the membrane. 400 μl 1×TE was added to each of the sample tubes and all contents were transferred to the washed Microcon-YM30 column (Amicon, Millipore Corp., Bedford, Mass.). The column was spun at 13,000 rpm for 5-6 minutes until approximately 50 μl was left on the membrane. The column was checked for dye crystals along the edge of the column membrane, which indicated that the probe was likely to be good. 450 μl 1×TE were added to the column and the column was spun down to ˜50 μl as above. The presence of crystals was confirmed. The Cy-3 labeled probe was placed into a clean tube, and the column was spun at 14,000 rpm for 1 minute to elute the probe. The Cy-3 labeled probe was added to the Cy-5 labeled probe in the column, and approximately 450 μl 1×TE was added to the column. The column was spun at 13,000 rpm until approximately 13-14 μl of combined probe remained on the membrane, which was checked with a pipette. The combined probe was inverted into a clean tube, and spun at 14,000 for 1 minute to elute. The probe (14 μl) was transferred into a clean Eppendorf tube and stored at 4° C. until used in the hybridization reaction.

[0215] Probe Hybridization: Twenty μl of water were added to each humidifying well in the Hybridization Chamber (to maintain humidity). Then, 40 μl of prehybridization buffer (5×SSC, 0.1% SDS, 1% BSA (Sigma) warmed to 42° C.) were placed in the center of the slide and the cover slip was placed on the slide, taking care to prevent bubble accumulation beneath the slip. The margin clamps on the Hybridization Chamber were firmly attached, and the chamber was incubated at 42° C. for least 1 hour. The slide was washed in distilled water for 2 minutes, followed by isopropanol for 2 minutes. The slide was dried in a centrifuge (5804R, Eppendorf) at 705 rpm (˜70×g) for 4 minutes, then prepared for hybridization as discussed above. The slide was hybridized within 1 hour of the prehybridization step. Two 2 μl COT1-DNA (Hoffman La Roche, Nutley, N.J. 07110 USA) (1 μg/μl), 2 μl polyA (Sigma) (8-10 μg/μl), and 2 μl yeast tRNA (Sigma, Ronkonkoma, N.Y. 11779 USA) (4 μg/μl) were mixed with the probe. Then, the probe was denatured for 1 minute at 100° C., placed briefly on ice to cool the reaction, and spun down in a centrifuge. Twenty μl of 2× hybridization buffer (50% formamide, 10×SSC, 0.2% SDS, warmed to 42° C.) were added to the denatured probe, mixed well (taking care to minimize bubble formation) and kept at 42° C. until ready to spot on the slide. The hybridization chamber was prepared as in the prehybridization step with 20 μl of distilled water in each well. The slides were placed face-up in the chambers, and the probe was hybridized with the slide for 14-16 hrs at 42° C.

[0216] Slide Washes: The margin clamps on the Hybridization Chamber were carefully removed to prevent water from seeping in and contaminating the array. The slide was removed from the chamber, held with forceps and the cover slip allowed to fall off into the solution containing 2×SSC, 0.1% SDS. The slide was washed for 4 minutes in 1×SSC, 0.1% SDS, for 4 minutes in 0.2×SSC, and for 1 minute in 0.05×SSC. The slide was spun dry in a centrifuge at 705 rpm (approximately 70×g) for 4 minutes. If water droplets were seen on the slide, it was spin again for another 4 minutes. Exposure to light was minimized by placing the dried slides in a slide box until ready for scanning.

[0217] Statistical Analysis: The logarithmic expression ratios for the spots on each array were normalized by subtracting the median logarithmic ratio for the same array. Data were filtered to exclude spots with size less than 25 μm, intensity less than 2 times background or less than 300 units in both red and green channels, and any poor-quality or missing spots. In addition, any features found to be missing or flagged in greater than 10% of the arrays were not included in the analysis. Application of these filters resulted in the inclusion of 6,445 of the total 7,651 features in subsequent analyses. Statistical comparison between tumors groups was performed using the “BRB Array Tools” software (developed by Dr. Richard Simon and Amy Peng, Biometrics Research Branch, Division of Cancer Treatment and Diagnosis, NCI, USA). A modified F-test is run on each gene's log-ratio values, and the significance of that gene is determined with P<0.0001 considered significant. This stringent P value is selected in lieu of the Bonferroni correction for multiple comparisons, which was deemed excessively restrictive (FIG. 1) (see Bland and Altman, B.M.J; 310: 170, 1995).

[0218] Semi-quantitative PCR: Five samples from each tumor group (BRCA-1, BRCA-2, sporadic) were selected at random. For each sample, 3.5 μg of total RNA was reverse-transcribed using oligo dT primers and 400 units of Superscript II reverse transcriptase (Invitrogen, Carlsbad, Calif.) in the presence of all four deoxyribonucleoside 5′-triphosphates (each at 10 mM) (InVitrogen, Carlsbad, Calif.) and 40 units of RNAse inhibitor (Promega, Madison, Wis.). Reverse transcription was performed in a total reaction volume of 40 μl, of which 1 μl was subsequently used for each PCR reaction. Preliminary experiments were performed to identify optimal cycle number for each gene. Thirty cycles was found to be optimal amplification for all amplified RNAs except for HLA-DRB1 and CD74, which were amplified for 26 cycles. Polymerase chain reaction was performed using the GeneAmp PCR kit (PE Applied Biosystems, Foster City, Calif.) according to the manufacturer's instructions. Representative gene specific primer sequences are shown in Table 3:

TABLE 3
Primer pairs for RNA amplification.

| | |
|---|---|
| Gene specific primer pair | SEQ ID NO. |

| | | |
|---|---|---|
| ACTB | 5′-ATGTGGATCAGCAAGCAGGA-3′ | SEQ ID NO: 2 |
| | 5′-GGTGGCTTTTAGGATGGCAA-3′ | SEQ ID NO: 3 |
| HE4 | 5′-TTCGGCTTCACCCTAGTCTCA-3 | SEQ ID NO: 4 |
| | 5′-AGAGGGAATACAGAGTCCCGAA-3′ | SEQ ID NO: 5 |
| ZFP36 | 5′-ACCCTGATGAATATGCCAGCA-3′ | SEQ ID NO: 6 |
| | 5′-GCTACTTGCTTTTGGAGGGTA-3′ | SEQ ID NO: 7 |
| RGS1 | 5′-GACTCTTATCCCAGGTTCCTCA-3′ | SEQ ID NO: 8 |
| | 5′-TGACTCCCTGGTTTTAAGAGCA-3′ | SEQ ID NO: 9 |
| CD74 | 5′-CCAGTCCCCATGTGAGAGCA-3′ | SEQ ID NO: 10 |
| | 5′-AGCTGATAACAAGCTTGGCTGA-3′ | SEQ ID NO: 11 |
| TOP2A | 5′-TGTCCCTCCACGAGAAACAGA-3′ | SEQ ID NO: 12 |
| | 5′-CGTACAGATTTTGCCCGAGGA-3′ | SEQ ID NO: 13 |
| HLA-DRB1 | 5′-GCGAGTTGAGCGTAAGGTGA-3′ | SEQ ID NO: 14 |
| | 5′-TTGAAGATGAGGCGCTGTCA-3′ | SEQ ID NO: 15 |

Amplified RT-PCR products were visualized on an agarose gel stained with ethidium bromide. The intensity of each band was an indicator of the quantity of DNA, as previously amplified by PCR. Thus, the intensity served as an indirect measure of the starting amount of the RNA amplified from the respective gene in each sample. Intensity was quantified using an ultraviolet light source and Alpha Imager software (Alpha Innotech Corp, San Leandro, Calif.). In addition to the above-mentioned tumor samples, sqRT-PCR evaluation of selected genes was also performed on the IOSE RNA for comparison.

### Results

[0219] Global assessment of Gene expression differences among tumor groups: Prior to investigating specific inter-group differences, the overall patterns of gene expression in the three tumor types (BRCA-1, BRCA-2, sporadic) were assessed. Multidimensional scaling (MDS), based on the expression levels of all 6,445 filtered genetic elements in the microarray, revealed that BRCA1- and BRCA2-linked tumors have distinct molecular profiles. In contrast, the sporadic samples showed a more heterogeneous distribution pattern, with many patterns clustering near the patterns of BRCA1-linked or BRCA2-linked samples (FIG. 1A). The MDS results suggested that the BRCA1- and BRCA2-associated groups would be the most different and that gene expression patterns for each of the BRCA groups and the sporadic tumors would have fewer differences. In support of this hypothesis, only a few genes showed statistically significant (P<0.0001) differential expression between the sporadic tumors and the BRCA1- or BRCA2-linked tumors, whereas 110 genes were differentially expressed between BRCA1-linked and BRCA2-linked tumors (FIG. 1B). In addition 34 EST sequences were differentially expressed between BRCA1- and BRCA2-linked tumors. The group of 144 total markers that were differentially expressed between BRCA1- and BRCA2-type tumor cells compared to normal ovarian epithelial cells is listed in Table 9 (see Addendum).

[0220] Differential gene expression among all three groups was also performed, which identified 60 genes and 3 EST sequences whose expression segregated BRCA1-linked, BRCA2-linked, and sporadic tumors (modified F test, wherein P<0.0001). Fifty-one of these 63 genes and EST sequences were also among the statistically significant discriminators of BRCA1 and BRCA2 tumors, highlighting the distinct gene expression profiles of these two groups. In addition, the expression profile of the combined BRCA1- and BRCA2-linked group was remarkably similar to that of the sporadic tumors, as demonstrated by only three genes showing differential expression (P<0.0001) between these groups [PSTP1P1 (SEQ ID NO: 538-540), IDH2 (SEQ ID NO: 541-542), and PCTK1 (SEQ ID NO: 527-528)]. These observations were in agreement with the multidimensional scaling analysis and demonstrated that, in terms of the overall pattern of gene expression, the BRCA1- and BRCA2-linked tumors are distinct from one another. Furthermore, the gene expression profiles of the sporadic tumors appear to share features of either BRCA1- or BRCA2-linked cancers, and these sporadic tumors are referred to herein as BRCA1-type or BRCA2-type sporadic ovarian tumors.

[0221] The group of 144 nucleic acid molecules listed in Table 9 was further investigated using hierarchical clustering (FIG. 2A, B). As expected, the BRCA-associated tumors showed distinct and contrasting expression profiles (FIG. 2A). Strikingly, the sporadic samples also segregated into two groups based on the expression patterns of the same 144 genes, exhibiting sporadic sample had a molecular profile similar to that of either the BRCA1- or the BRCA2-linked tumors. This observation was illustrated by hierarchical clustering of all samples, revealing distinct “BRCA1-type” and “BRCA2-type” clusters (FIG. 2A). This clustering further demonstrates that sporadic tumors (which do not contain the BRCA1 or BRCA2 mutations) can often be classified as BRCA1-type or BRCA2-type. Classification of sporadic tumors into these subtypes may provide guidance in treating the patient. For example, a subject who has a BRCA1-type or BRCA2-type sporadic tumor may be treated similarly to a subject who has a BRCA1-linked or BRCA2-linked tumor. The identification of BRCA1- or BRCA2-type sporadic tumors also allows tumors (or subjects) to be selected for specific drug regimens that are particularly effective with the associated mutation type.

[0222] Color-coding is usually used to represent the relative transcript expression ratio, as measured by cDNA microarray analysis. Red customarily indicates the maximum point in gene expression, green the minimum, and levels closer to the mean approach black

[0223] To ensure that the BRCA-linked samples were not biasing the observed clustering patterns, the hierarchical architecture of gene expression in sporadic tumors was examined separately. Even in the absence of the BRCA-linked samples, two distinct cluster phenotypes were observed, each comprised of those sporadic samples that previously grouped with BRCA1- and BRCA2-linked tumors (FIG. 2B). Tumor histology and patient age were also evaluated for possible confounding effects on the observed BRCA1-type and BRCA2-type clusters. Neither variable was found to influence clustering patterns (FIG. 2A, 2B).

[0224] Genes differentially expressed between BRCA1- and BRCA2-linked ovarian carcinomas: The analysis of overall gene expression patterns established that the same genes whose expression differentiated BRCA1 and BRCA2-linked tumors, also identified two major sub-populations of sporadic cancers (FIG. 3). As such, these nucleic acids are believed to represent important mediators of common genetic pathways in ovarian cancer and/or carcinogenesis. Many of these genes are involved in important cellular functions including signal transduction, RNA processing and translation, chemokine signaling and immune modification, and DNA repair. By way of example, the BRCA1-associated tumors were characterized by higher AKT1 (SEQ ID NO: 504-506) and lower PTEN (SEQ ID NO: 507-509) relative expression. In addition UBL1 (SEQ ID NO: 510-512) (also known as SUMO-1 and sentrin) was more highly expressed in BRCA1-associated tumors. This molecule interacts with RAD51 and RAD52 and has been proposed to have a regulatory role in homologous recombination (see Li et al., Nuc. Ac. Res: 28: 1145-1153, 2000). The preferential expression of UBL1 (SEQ ID NO: 510-512) in the BRCA1-linked samples may prove to be relevant to possible differences in DNA repair actions of the BRCA tumor suppressor genes.

[0225] By way of example, the BRCA2-linked tumors showed higher relative expression of WNT2 (SEQ ID NO: 513-514 and SFRP4 (SEQ ID NO: 515-517), which are members of the wnt-β-catenin-TCF signaling pathway. Another notable observation is that both BRCA1- and BRCA2-linked tumors showed preferential expression of proto-oncogenes commonly altered in hematologic malignancies. BRCA1 tumors showed higher expression levels of RUNX1(SEQ ID NO: 518-520)/AML1, while BRCA2-associated samples showed preferential expression of TAL1 (SEQ ID NO: 521-523)/SCL. Both of these oncogenes are transcription factors involved in proliferation, and their preferential expression in BRCA1- and BRCA2-linked tumors may indicate that the activation of such a “proliferation driver” is a necessary step in ovarian carcinogenesis.

[0226] Gene expression differences between BRCA-linked and sporadic tumors: Nine non-redundant genes showed significant differential expression between BRCA1-linked and sporadic tumors [CD72 (SEQ ID NO: 805), SLC25A11 (SEQ ID NO: 544), LCN2 (SEQ ID NO: 545-547), PSTP1P1 (SEQ ID NO: 538-540), SIAHBP1 (SEQ ID NO: 543), UBE1 (SEQ ID NO: 533), WAS (SEQ ID NO: 524-526), IDH2 (SEQ ID NO: 541-542), PCTK1 (SEQ ID NO: 527-528), P<0.0001, FIG. 4A. A noteworthy observation was that three of these genes, WAS (SEQ ID NO: 524-526), PCTK1 (SEQ ID NO: 527-528), and UBE1 (SEQ ID NO: 533), have all been mapped to the Xp11.23 and all were higher expressed in the BRCA1-linked tumors. This observation seemed unlikely to be explained by chance alone as only 35 of the total 6,445 filtered spots (0.5%) on the microarray represent genes mapped to Xp11. To further investigate this pattern, a larger group of 53 genes was considered for differential expression between BRCA1-linked and sporadic tumors under the less stringent significance level of P<0.001. Among this group three additional genes, SMC1L1 (SEQ ID NO: 530), ARAF1 (SEQ ID NO: 531-532), and EBP (SEQ ID NO: 529), were discovered that also mapped to the Xp11.23 locus and also showed higher mean expression in BRCA1-associated samples (FIG. 4D). Thus, six of fifty-three genes differentially expressed between BRCA1-linked and sporadic samples (P<0.001) mapped to Xp11.23 and all showed higher mean expression in BRCA1-linked tumors. In silico analysis of the location of these genes revealed that they are all confined to a 5-Mb region of DNA in Xp11.23 (Ensemble database, Prous Science, Philadelphia, Pa. 19102, U.S.A.).

[0227] The comparison between BRCA2-linked and sporadic tumors revealed only two genes with differential expression among these groups at the significance level of P<0.0001 (FIG. 3). The gene designated as LOC51760 (SEQ ID NO: 534-535) is also known as B/K (encoding the brain/kidney protein) and is moderately homologous to the synaptotagmin family of vesicular transport molecules. The second differentially expressed gene encodes low-density lipoprotein-related protein-associated protein 1 (LRPAP1), also known as alpha-2-macroglobulin receptor-associated protein 1.

[0228] A further comparison consisted of investigating gene expression differences between the combined BRCA-linked group and the sporadic group, which revealed only three non-redundant, differentially expressed genes [PSTP1P1 (SEQ ID NO: 538-540), IDH2 (SEQ ID NO: 541-542), and PCTK1 (SEQ ID NO: 527-528), FIG. 4C. All three genes were among the group of genes that differentiated BRCA1-linked and sporadic samples. This finding is consistent with the observation that the RNA profiles of sporadic ovarian cancers share significant similarities with those of BRCA1-linked or BRCA2-linked tumors. It is believed that the similarities shown in the RNA profiles is a general characteristic that applies to gene and protein component profiles as well. The small number of differentially expressed genes obtained from the comparison of the combined BRCA group to the sporadic tumors is the result of the latter also consisting of BRCA1-type and BRCA2-type molecular classes.

[0229] Gene expression features distinguishing ovarian cancers from ovarian surface epithelial cells: Gene expression patterns common among all tumor types were investigated to identify genes that may be associated with the transformed state, i.e., genes commonly expressed in ovarian tumors irrespective of their hereditary or sporadic nature. Gene expression in all sixty-one primary tumor samples was compared to immortalized ovarian surface epithelial (IOSE) cells used as the common reference. Using the selection criterion of two-fold or greater expression ratio relative to the IOSE reference in at least two-thirds of all tumors, a list of 201 non-redundant genes and ESTs was generated. The top twenty-five overexpressed (IL8 (SEQ ID NO: 449-451), GRO1 (SEQ ID NO: 452-453), ALDH1A3 (SEQ ID NO: 454-456), MMP1 (SEQ ID NO: 457-459), OSF-2 (SEQ ID NO: 460-461), CDC2SB (SEQ ID NO: 462-464), FLNA (SEQ ID NO: 465-467), TFP12 (SEQ ID NO: 468-469), FGF2 (SEQ ID NO: 470-472), CD44 (SEQ ID NO: 473-475), DYT1 (SEQ ID NO: 476-477), UCHL1 (SEQ ID NO: 478), FGF2 (SEQ ID NO: 470-472), PLAU (SEQ ID NO: 479-480), LDHA (SEQ ID NO: 256), PTGS2 (SEQ ID NO: 481-483), PRNP (SEQ ID NO: 484-486), MT1X (SEQ ID NO: 487-488), UGB (SEQ ID NO: 489-490), PBEF (SEQ ID NO: 491-493), TXNRD1 (SEQ ID NO: 494-496), NTS (SEQ ID NO: 497-499), PTGS2 (SEQ ID NO: 481-483), MT2A (SEQ ID NO: 500-502), ZNF220 (SEQ ID NO: 503)) and twenty-five down-regulated (FLJ22174 (SEQ ID NO: 30-31), DDR1 (SEQ ID NO: 74-76), SERPINF2 (SEQ ID NO: 18-19), HLA-DRB1 (SEQ ID NO: 87-88), IFITM2 (SEQ ID NOS: 55-57, 58-59), HGF (SEQ ID NO: 174-175), SORL1 (SEQ ID NO: 149-151), CP (SEQ ID NO: 83-84), HLA-DRA (SEQ ID NO: 94-96), BRF2 (SEQ ID NO: 190-192), ABCB1 (SEQ ID NO: 164-166), GIP3 (SEQ ID NO: 68-69), RGS1 (SEQ ID NO: 122-123), IFITM1 (SEQ ID NOS: 50-51, 52-54), FOS (SEQ ID NO: 133-135), PPP1R7 (179-180), HLA-DPA (SEQ ID NO: 97-99), HLA-DRB5 (SEQ ID NO: 85-86), TLR3 (SEQ ID NO: 199-201), ZFP36 (SEQ ID NOS: 167-168, 169-171, 172-173), SGK (SEQ ID NO: 176-178), HLA-DRB1 (SEQ ID NO: 87-88), HE4 (SEQ ID NO: 60), CD74 (SEQ ID NO: 89-91, CD24 (SEQ ID NO: 181-182)) named genes (by order of magnitude) are presented in FIGS. 4A and 4B. This analysis revealed two potentially significant functional groups of genes to be overexpressed in ovarian cancers. The first group consisted of several of the genes that have all been previously shown to be interferon-inducible (HLA-DRB1 (SEQ ID NO: 87-88), HLA-DRB5 (SEQ ID NO: 85-86), HLA-DRA (SEQ ID NO. 373-374), HLA-DPA (SEQ ID NO: 97-99), CD74 (SEQ ID NO: 89-91), IFITM1 (SEQ ID NOS. 50-51, 52-54), and IFITM2 (SEQ ID NOS: 55-57, 58-59), as indicated by italics in FIGS. 4A and 4B). The second group consisted of immediate-early response genes (BRF2, ZFP36, SGK, and FOS). In addition, several genes previously reported to be overexpressed in ovarian epithelial tumors were present in the list of genes overexpressed in tumors relative to the IOSE cells (FIGS. 4A and 4B). Elevated levels of CLU, CD24, and MUC1 were also observed. These results identify additional potential markers of ovarian cancer. Table 9 lists the 144 nucleic acids that showed significantly elevated expression in ovarian cancer. These genes were selected based on consistency across all the pooled experiments and a significant difference in the average expression in the 40 independent samples, using a criteria of a tumor-to-ovarian surface epithelial cell line ratio of two or greater in at least 66% of all tumors.

### EXAMPLE 2

### Semiquantitative RT-PCR Confirms and Complements cDNA Microarray Data

[0230] This example describes how the results found in the previous example were confirmed using semiquantitative RT-PCR.

[0231] To validate the array data, semiquantitative RT-PCR (sqRT-PCR) analysis of several mRNAs was performed in a representative subset of tumors consisting of five BRCA1-linked, five BRCA2-linked, and five sporadic RNA samples. The tumor samples were randomly selected. The expression of TOP2A (SEQ ID NO: 448), RGS1 (SEQ ID NO: 398, CD74 (SEQ ID NOS: 89-91, 92-93), HE4 (SEQ ID NO: 60), HLA-DRB1 (SEQ ID NO: 87-88), and ZFP36 (SEQ ID NO: 167-168, 169-171, 172-173) were evaluated using sqRT-PCR, with β-actin as a normalizing control. Because data obtained from cDNA microarrays is in the form of relative expression ratios between tumors and the reference, RNA from IOSE cells and a histologically normal, postmenopausal ovarian RNA sample in the sqRT-PCR experiments was included for comparison. The results of these sqRT-PCR experiments were consistent with the cDNA microarray relative expression data for all six genes evaluated (FIGS. 5A and 5B). As anticipated from the microarray results (FIG. 4), HE4 expression was consistently elevated in all fifteen tumor samples compared to IOSE reference cell-line and normal ovary (FIGS. 5A and 5B). Invariant chain genes, also known as CD74 and RGS1, were overexpressed in the majority of tumors as indicated by microarray analysis (FIG. 4). Both were also found to have increased expression in the majority of tumors as evaluated by sqRT-PCR (FIGS. 5A and 5B). The expression of TOP2A was found to be highest in the reference IOSE RNA. Furthermore, compared with the expression level in the normal postmenopausal ovary, twelve of the fifteen tested tumor samples showed elevated and variable TOP2A gene expression.

[0232] Several members of the immediate-early response cascade showed elevated expression in tumors as compared to IOSE cells in the microarray experiments (as indicated by the notation * in FIGS. 4A and 4B); however, some of these genes have previously been shown to have lower expression in ovarian cancer compared to normal ovary (see Welsh et al. Proc. Natl. Acad. Sci. U.S.A. 98: 1176-1181, 2001, and Wang et al., Gene 229: 101-108, 1999).

[0233] This discrepancy suggested that the elevated relative ratio observed in these experiments may be driven by low expression levels of these genes in IOSE cells grown in culture. In order to test this hypothesis, sqRT-PCR was used to compare ZFP36 (an immediate-early gene also known as G0S24 and Tis11) expression in tumors to that of normal ovary and IOSE cells. As suspected, normal ovary had one of the highest expression levels of ZFP36, followed by that of the majority of tumors (FIG. 5A), while the lowest expression level was observed in the IOSE cells.

[0234] In addition to statistical analysis, multidimensional scaling (MDS) and hierarchical clustering techniques using a correlation metric and average linkage were used for evaluating overall gene expression (see Eisen et al., Proc. Natl. Acad. Sci. U.S.A. 95: 14863-14868, 1998).

### EXAMPLE 3

### Identification of Additional Genes with Altered Expression in Ovarian Cancer

[0235] This example provides a description of how additional disclosed ovarian cancer-related nucleic acid molecules were identified. These ovarian cancer-related molecules show differences in expression in subjects having ovarian cancer compared to expression in normal ovarian surface epithelial cells.

[0236] Using a different microarrays and methods essentially similar to those described above in Example 1, thirty-one ovarian epithelial cancers were compared to two normal postmenopausal ovarian samples. 141 additional ovarian cancer-related nucleic acid molecules were identified and further characterized (Tables 6 and 7, Addendum).

Methods and Materials:

[0237] Methods and materials were similar to those described in Example 1, except that different microarrays were used. The nucleic acids constituted 7,600 features, and representing different (non-redundant) transcripts including multiple known named genes and ESTs. The cDNA microarrays were constructed by Dr. Eric Chuang (Division of Radiation Oncology) at the Advanced Technology Center (Gaithersburg, Md. 20877). The genes represented on these arrays are composed of 7,600 cDNA clones and ESTs and are commercially available (Research Genetics, 2130 Memorial Parkway, Huntsvillle, Ala. 35801, U.S).

[0238] The nucleic acid molecule expression patterns of thirty-one ovarian epithelial cancers were compared to two normal postmenopausal ovarian samples. The tissues were analyzed once, as the correlation coefficient from previously repeated array experiments was shown to be 0.92-0.95. Each tumor and normal sample was directly compared to a “reference RNA” consisting of a mix of nine different human cell lines (Stratagene, La Jolla, Calif.), allowing for indirect comparison of gene expression in tumors and normal ovarian samples.

[0239] Hierarchcal clustering was performed as described above and as set forth in Eisen et al., Proc. Natl. Acad. Sci. U.S.A. 95: 14863-8, 1998.

Results

Systematically Altered Genes

[0240] Using these methods, two additional sets of nucleic acid molecules were identified that showed differential expression in subjects having ovarian cancer. Table 4 (see Addendum) provides a list of nucleic acid molecules that were found to be underexpressed in subjects having ovarian cancer, and their average gene log expression ratios. Table 5 (see Addendum) shows nucleic acid molecules that were found to be overexpressed in persons having ovarian cancer, and their average gene log expression ratios.

[0241] Genes underexpressed in ovarian tumors (see Table 4) may represent potential tumor suppressors. The induction of the expression of these genes through therapeutic means, for instance by induction through drug or gene therapy, may slow tumor growth and/or increase tumor cell death.

[0242] Among the 100 underexpressed genes were several oncogenes coding for proteins that are normally associated with the process of malignant transformation, 8ncluding JUN (SEQ ID NO: 137-138), KIT (SEQ ID NO: 298-299), and MAF (SEQ ID NO: 229-230). The lower expression of these genes in cancers compared to expression in non-cancerous subjects is unexpected and is believed to reflect novel effects unique to ovarian cancer. Additionally, CDKN1C (SEQ ID NO: 249), NBL1 (SEQ ID NO: 273), and ING1L (SEQ ID NO: 322) are recognized tumor suppressors, the downregulation of which may be involved in the process of tumor formation and/or progression. TGF beta cascade members TGFBR3 (SEQ ID NO: 216-218) and EBAF (SEQ ID NO: 294) (both shown herein to be underexpressed in ovarian cancer) present potential interest in light of the recent implication of the TGF beta pathway in normal and oral contraceptive-induced ovarian epithelial cell death and turnover (see Rodriguez et al., J. Natl. Can. Inst. 94(1): 50-60, 2002). Thus, downregulation of these nucleic acids may lead to inappropriate growth and possible transformation.

[0243] Genes that were overexpressed in ovarian tumors (Table 5) compared to normal tissue are believed to represent suitable targets for therapy and/or diagnosis, prognosis and staging of ovarian cancer. The decrease of the expression of these genes through therapeutic means, for instance by drug or gene therapy, presents a potential method of inhibition of ovarian cancer.

[0244] Among the fifty-nine overexpressed genes were several genes coding for proteins that are believed to be particularly promising as gene targets, including the following: SLP1 (Secretory leukocyte protease inhibitor) (SEQ ID NO: 340-341); SPP1 (Secreted phosphoprotein 1) (SEQ ID NO: 342); CKS1 (CDC28 protein kinase 1) (SEQ ID NO: 345-347); ZWINT(ZW10 interactor) (SEQ ID NO: 354); BF(B-factor, properdin) (SEQ ID NO: 343-344); MMP7 (Matrix metalloproteinase 7) (SEQ ID NO: 348-349); FOLR1 (Folate receptor 1) (SEQ ID NO: 364-365); KLK8 (Kallikrein 8) (SEQ ID NO: 368; CR1P1 (Cysteine-rich protein 1) (SEQ ID NO: 375; EYA2 (Eyes absent) (SEQ ID NO: 392-393); and PAX8 (Paired box gene 8) (SEQ ID NO: 350-351).

[0245] SLP1 is a particularly promising candidate as a potential ovarian cancer marker or detector. This protein has also been shown to be overexpressed in lung cancer (see Ameshima et al., Cancer 89(7): 1448-1456, 2000) and is detectable in the saliva, enabling non-invasive testing (see Shugars et al., Gerontology, 47(5): 246-253, 2001). MMP7 over-expression has been described in primary and metastatic gastric cancers (see Mori et al., Surgery, 131(1 Pt 2): S39-S47, 2002) as well as colorectal carcinomas (see Ougolkov et al., Gastroenterology. 122(1): 60-71, 2002). MMP7 appears to be involved in new blood vessel formation, which is a prerequisite for tumor growth (see Nishizuka et al., Cancer Lett. 173(2): 175-182, 2001). SPP1 (otherwise known as osteopondin) has also been associated with a number of malignancies (see Fedarko et al., Clin. Cancer Res. 12: 4060-4066, 2001) including a recent report showing higher expression in ovarian cancer (see Mok et al., J. Natl. Cancer Inst. 93(19) 1458-64, 2001). ZWINT is a newly discovered protein involved in kinetochore binding and centromere function (see Starr et al., J. Cell Sci. 13(Pt 11): 1939-1950, 2000). Properdin is involved in immune function and encodes complement factor B, a component of the alternative pathway of complement activation. CR1P1 is believed to be involved in zinc transport. Kallikrein 8 (also TADG14) is normally expressed in neural tissue, but appears to be altered such that it is highly expressed in ovarian cancers (see Underwood et al., Cancer Res. 59(17): 4435-4439, 1999). EYA2, named for its involvement in eye development, is an important developmental gene that is potentially important in ovarian cancer. EYA2 is located on the 20q13 chromosomal locus, which is the most frequently amplified chromosome region in ovarian cancers (see Tanner et al., Clin. Cancer Res. 5: 1833-1839, 2000). Other genes localized to the same 20q13 chromosomal region are BMP7, which is also involved in development, and SLP1 (discussed above), as well as HE4 (identified in Example 1, above), all of which show higher expression in ovarian tumors. Thus, the upregulation of these nucleic acids may in part be due to amplification of 20q13 in the tumors studied.

[0246] PAX8 is involved in thyroid differentiation and normal function (see Pasca et al., Proc. Natl. Acad. Sci. U.S.A. 97(24): 13144-13149, 2000). Furthermore, the folate receptor has been shown to be overexpressed in ovarian cancer (see Hough et al., Cancer Res. 61(10): 3869-3876, 2001 and Bagnoli et al., Oncogene, 19(41): 4754-4763, 2000). Finally, the specific pattern of caveolin (CAV1) under-expression and Folate receptor (FOLR1) over-expression disclosed herein (see Tables 4 & 5, Addendum) is consistent with the reciprocal regulation of the expression of genes in ovarian cancer (see Bagnoli et al., Oncogene, 19(41): 4754-4763, 2000).

[0247] For each of the above specifically enumerated genes, a survey of the Serial Analysis of Gene Expression (SAGE) database (available through the UniGene search engine on the National Center for Biotechnology Information website) revealed that the expression of these genes is limited to a relatively small number of tissues, including ovarian cancers and some other tumors, for instance pancreatic or breast. In addition, SLP1 and SPP1 are secreted proteins that may be detectable as a diagnostic marker in the serum of a subject.

### EXAMPLE 4

### Classification of a Tumor into BRCA1-Linked or BRCA2-Linked Tumor Class

[0248] This example describes how to classify a tumor into a BRCA1-like or BRCA2-like tumor type using compound covariate prediction analysis.

[0249] Class prediction can be performed using a Compound Covariate Predictor tool, available as part of the BRB Array Tools software provided for download on the National Cancer Institute Internet website. Detailed information about the Compound Covariate Predictor is provided by the Biometric Research Branch, National Cancer Institute and can be found in the following technical reports listed at that site” McShane et al., “Methods for assessing reproducibility of clustering patterns observed in analyses of microarray data” and Radmacher et al., “A paradigm for class prediction using gene expression profiles.”

[0250] The compound covariate predictor tool creates a multivariate predictor for one of two classes for each sample using markers in the multivariate predictor that are univariately significant at the selected significance cutoff for a given set of data (see discussion above in Section V. D, “Compound Covariate Predictor Analysis.”). The statistical significance cutoff for a given set of data can be chosen based upon the level of confidence desired.

[0251] By way of example, the markers provided in Table 10 satisfy a cutoff of P<0.0005, and are therefore suitable for use with compound covariate predictor analysis. The multivariate predictor is a weighted linear combination of log-ratios for genes that are univariately significant. The weight consists of the univariate t-statistics for comparing the classes.

[0252] Using the compound covariate predictor and the markers provided in Table 10, a sample of ovarian tissue can be classified into a BRCA1-like or BRCA2-like tumor. Samples are prepared as described in Example 1, and logarithmic expression ratios obtained for each marker used in the compound covariate predictor analysis.

[0253] The markers provided in Table 10 were used to segregate BRCA1-linked and BRCA1-type sporadic tumor samples from BRCA2-linked and BRCA2-type sporadic samples, in a multivariate analysis. Based upon the information regarding these classes that was obtained using other approaches (such as hierarchical clustering, see Example 1), compound covariate predictor analysis classified the tumors with 92% accuracy (see Table 11).

[0254] Using this method, an unknown tumor can be classified into one of any two groups provided that markers that are univariately significant at the selected significance cutoff for the desired groups are known. In addition, the gene expression data for the markers should be obtained using the same reference standard as the sample tumor.

[0255] Further analysis, such as a “leave-one-out” approach may be employed to check the veracity of the compound covariate predictor model. In this approach, each of the tumors is individually segregated, and the analysis completed using that tumor against the remaining samples. In this way, the strength of the data set is measured against each individual sample (tumor), confirming that the data set is useful, independently of any individual sample. See Radmacher et al., “A paradigm for class prediction using gene expression profiles,” available on the Biometric Research Branch, National Cancer Institute Internet site.

### EXAMPLE 5

### Expression of Ovarian Cancer-Related Polypeptides

[0256] This example describes how to express the ovarian cancer-related proteins disclosed herein using various techniques.

[0257] The disclosed ovarian cancer-related proteins (and fragments thereof) can be expressed by standard laboratory technique. After expression, the purified ovarian cancer-related protein or polypeptide may be used for instance for functional analyses, antibody production, diagnostics, prognostics, and patient therapy, e.g., for prevention or treatment of ovarian cancer. Furthermore, the DNA sequences encoding the disclosed ovarian cancer-related proteins can be manipulated in studies to understand the expression of these genes and the function of their products. Mutant forms of human ovarian cancer-related proteins (and corresponding encoding sequences) may be isolated based upon information contained herein, and may be studied in order to detect alteration in expression patterns in terms of relative quantities, tissue specificity and functional properties of the encoded mutant ovarian cancer-related protein. Partial or full-length cDNA sequences that encode the subject protein may be ligated into bacterial expression vectors. Methods for expressing large amounts of protein from a cloned gene introduced into Escherichia coli (E. coli) or other prokaryotes may be utilized for the purification, localization, and functional analysis of proteins. For example, fusion proteins consisting of amino terminal peptides encoded by a portion of the E. coli lacZ or trpE gene linked to an ovarian cancer-related protein may be used to prepare polyclonal and monoclonal antibodies against these proteins. Thereafter, these antibodies may be used to purify proteins by immunoaffinity chromatography, in diagnostic assays to quantitate the levels of protein and to localize proteins in tissues and individual cells by immunofluorescence.

[0258] Intact native protein may also be produced in E. coli in large amounts for functional studies. Methods and plasmid vectors for producing fusion proteins and intact native proteins in bacteria are described in Sambrook et al. (In Molecular Cloning: A Laboratory Manual, Ch. 17, CSHL, New York, 1989). Such fusion proteins may be made in large amounts, are easy to purify, and can be used to elicit antibody response. Native proteins can be produced in bacteria by placing a strong, regulated promoter and an efficient ribosome-binding site upstream of the cloned gene. If low levels of protein are produced, additional steps may be taken to increase protein production; if high levels of protein are produced, purification is relatively easy. Suitable methods are presented in Sambrook et al. (In Molecular Cloning: A Laboratory Manual, CSHL, New York, 1989) and are well known in the art. Often, proteins expressed at high levels are found in insoluble inclusion bodies. Methods for extracting proteins from these aggregates are described by Sambrook et al. (In Molecular Cloning: A Laboratory Manual, Ch. 17, CSHL. New York, 1989). Vector systems suitable for the expression of lacZ fusion genes include the pUR series of vectors (see Ruther and Muller-Hill, EMBO J. 2:1791, 1983), pEX 1-3 (see Stanley and Luzio, EMBO J. 3:1429, 1984) and pMR100 (see Gray et al., Proc. Natl. Acad. Sci. USA 79:6598, 1982). Vectors suitable for the production of intact native proteins include pKC30 (see Shimatake and Rosenberg, Nature 292:128, 1981), pKK177-3 (see Amann and Brositis, Gene 40:183, 1985) and pET-3 (see Studiar and Moffatt, J. Mol. Biol. 189:113, 1986). Fusion proteins, for instance fusions that incorporate a portion of an ovarian cancer-related protein, may be isolated from protein gels, lyophilized, ground into a powder and used as an antigen. The DNA sequence can also be transferred from its existing context to other cloning vehicles, such as other plasmids, bacteriophages, cosmids, animal viruses and yeast artificial chromosomes (YACs) (see Burke et al., Science 236:806-812, 1987). These vectors may then be introduced into a variety of hosts including somatic cells, and simple or complex organisms, such as bacteria, fungi (see Timberlake and Marshall, Science 244:1313-1317, 1989), invertebrates, plants (see Gasser and Fraley, Science 244:1293, 1989), and animals (see Pursel et al., Science 244:1281-1288, 1989), which cell or organisms are rendered transgenic by the introduction of the heterologous ovarian cancer-related cDNA.

[0259] For expression in mammalian cells, the cDNA sequence may be ligated to heterologous promoters, such as the simian virus (SV) 40 promoter in the pSV2 vector (see Mulligan and Berg, Proc. Natl. Acad. Sci. USA 78:2072-2076, 1981), and introduced into cells, such as monkey COS-1 cells (see Gluzman, Cell 23:175-182, 1981), to achieve transient or long-term expression. The stable integration of the chimeric gene construct may be maintained in mammalian cells by biochemical selection, for example with neomycin (see Southern and Berg, J. Mol. Appl. Genet. 1: 327-341, 1982) or mycophenolic acid (see Mulligan and Berg, Proc. Natl. Acad. Sci. USA 78: 2072-2076, 1981).

[0260] DNA sequences can be manipulated with standard procedures such as restriction enzyme digestion, fill-in with DNA polymerase, deletion by exonuclease, extension by terminal deoxynucleotide transferase, ligation of synthetic or cloned DNA sequences, site-directed sequence-alteration via single-stranded bacteriophage intermediate or with the use of specific oligonucleotides in combination with PCR.

[0261] The cDNA sequence (or portions derived from it) or a mini gene (a cDNA with an intron and its own promoter) may be introduced into eukaryotic expression vectors by conventional techniques. These vectors are designed to permit the transcription of the cDNA in eukaryotic cells by providing regulatory sequences that initiate and enhance the transcription of the cDNA and ensure its proper splicing and polyadenylation. Vectors containing the promoter and enhancer regions of the SV40 or long terminal repeat (LTR) of the Rous Sarcoma virus and polyadenylation and splicing signal from SV40 are readily available (see Mulligan et al., Proc. Natl. Acad. Sci. USA 78:1078-2076, 1981; Gorman et al., Proc. Natl. Acad. Sci USA 78:6777-6781, 1982). The level of expression of the cDNA can be manipulated with this type of vector, either by using promoters that have different activities (for example, the baculovirus pAC373 can express cDNAs at high levels in S. frugiperda cells (see Summers and Smith, In Genetically Altered Viruses and the Environment, Fields et al. (Eds.) 22:319-328, CSHL Press, Cold Spring Harbor, N.Y., 1985) or by using vectors that contain promoters amenable to modulation, for example, the glucocorticoid-responsive promoter from the mouse mammary tumor virus (see Lee et al., Nature 294:228, 1982). The expression of the cDNA can be monitored in the recipient cells 24 to 72 hours after introduction (transient expression).

[0262] In addition, some vectors contain selectable markers such as the gpt (see Mulligan and Berg, Proc. Natl. Acad. Sci. USA 78:2072-2076, 1981) or neo (see Southern and Berg, J. Mol. Appl. Genet. 1:327-341, 1982) bacterial genes. These selectable markers permit selection of transfected cells that exhibit stable, long-term expression of the vectors (and therefore the cDNA). The vectors can be maintained in the cells as episomal, freely replicating entities by using regulatory elements of viruses such as papilloma (see Sarver et al., Mol. Cell Biol. 1:486, 1981) or Epstein-Barr (see Sugden et al., Mol. Cell Biol. 5:410, 1985). Alternatively, one can also produce cell lines that have integrated the vector into genomic DNA. Both of these types of cell lines produce the gene product on a continuous basis. One can also produce cell lines that have amplified the number of copies of the vector (and therefore of the cDNA as well) to create cell lines that can produce high levels of the gene product (see Alt et al., J. Biol. Chem. 253:1357, 1978).

[0263] The transfer of DNA into eukaryotic, in particular human or other mammalian cells, is now a conventional technique. The vectors are introduced into the recipient cells as pure DNA (transfection) by, for example, precipitation with calcium phosphate (see Graham and vander Eb, Virology 52:466, 1973) or strontium phosphate (see Brash et al., Mol. Cell Biol. 7:2013, 1987), electroporation (see Neumann et al., EMBO J. 1:841, 1982), lipofection (see Felgner et al., Proc. Natl. Acad. Sci USA 84:7413, 1987), DEAE dextran (see McCuthan et al., J. Natl. Cancer Inst. 41:351, 1968), microinjection (see Mueller et al., Cell 15:579, 1978), protoplast fusion (see Schafner, Proc. Natl. Acad. Sci. USA 77:2163-2167, 1980), or pellet guns (see Klein et al., Nature 327:70, 1987). Alternatively, the cDNA, or fragments thereof, can be introduced by infection with virus vectors. Systems are developed that use, for example, retroviruses (see Bernstein et al., Gen. Engr'g 7:235, 1985), adenoviruses (see Ahmad et al., J. Virol. 57:267, 1986), or Herpes virus (see Spaete et al., Cell 30:295, 1982). MB1 encoding sequences can also be delivered to target cells in vitro via non-infectious systems, for instance liposomes.

[0264] These eukaryotic expression systems can be used for studies of ovarian cancer-related nucleic acids (such as those listed in Table 1) and mutant forms of these molecules, as well as ovarian cancer-related proteins and mutant forms of these protein. Such uses include, for example, the identification of regulatory elements located in the 5′ region of ovarian cancer-related genes on genomic clones that can be isolated from human genomic DNA libraries. The eukaryotic expression systems may also be used to study the function of the normal ovarian cancer-related proteins, specific portions of these proteins, or of naturally occurring or artificially produced mutant versions of ovarian cancer-related proteins.

[0265] Using the above techniques, the expression vectors containing ovarian cancer-related gene sequence or cDNA, or fragments or variants or mutants thereof, can be introduced into human cells, mammalian cells from other species or non-mammalian cells as desired. The choice of cell is determined by the purpose of the treatment. For example, monkey COS cells (see Gluzman. Cell 23:175-182, 1981) that produce high levels of the SV40 T antigen and permit the replication of vectors containing the SV40 origin of replication may be used. Similarly, Chinese hamster ovary (CHO), mouse NIH 3T3 fibroblasts or human fibroblasts or lymphoblasts may be used.

[0266] The present disclosure thus encompasses recombinant vectors that comprise all or part of an ovarian cancer-related gene or cDNA sequence (e.g., those listed in Table 1), for expression in a suitable host. In some embodiments, the ovarian cancer-related nucleic acid sequence is operatively linked in the vector to an expression control sequence to form a recombinant DNA molecule, so that the ovarian cancer-related polypeptide can be expressed. The expression control sequence may be selected from the group consisting of sequences that control the expression of genes of prokaryotic or eukaryotic cells and their viruses, and combinations thereof. The expression control sequence may be specifically selected from the group consisting of the lac system, the trp system, the tac system, the trc system, major operator and promoter regions of phage lambda, the control region of fd coat protein, the early and late promoters of SV40, promoters derived from polyoma, adenovirus, retrovirus, baculovirus and simian virus, the promoter for 3-phosphoglycerate kinase, the promoters of yeast acid phosphatase, the promoter of the yeast alpha-mating factors, and combinations thereof.

[0267] The host cell, which may be transfected with the vector of this disclosure, may be selected from the group consisting of E. coli, Pseudomonas, Bacillus subtilis, B. stearothermophilus or other bacilli; other bacteria; yeast; fungi; insect; mouse or other animal; or plant hosts; or human tissue cells.

[0268] It is appreciated that for mutant or variant ovarian cancer-related DNA sequences, similar systems are employed to express and produce the mutant product. In addition, fragments of an ovarian cancer-related protein can be expressed essentially as detailed above. Such fragments include individual ovarian cancer-related protein domains or sub-domains, as well as shorter fragments such as peptides. Ovarian cancer-related protein fragments (e.g., those having therapeutic properties) may be expressed in this manner also.

### EXAMPLE 6

### Suppression of Ovarian Cancer-Related Increased Gene Expression

[0269] This example describes how the ovarian cancer-related nucleic acids disclosed herein may be suppressed using various techniques.

[0270] A reduction of ovarian cancer-related protein expression in a transgenic cell may be obtained by introducing into cells an antisense construct based on an ovarian cancer-related protein encoding sequence, such as a cDNA or gene sequence or flanking regions thereof of any one of the proteins encoded by the nucleic acid molecules listed in Table 1, Table 9 or elsewhere herein. For antisense suppression, a nucleotide sequence encoding an ovarian cancer-related protein that is overexpressed in ovarian cancer, e.g. all or a portion of the small cell lung carcinoma cluster 4 antigen (CD24) (SEQ ID NO: 181-182), secretory leukocyte protease inhibitor antileukoproteinase (SLP1) (SEQ ID NO: 340-341), secreted phosphoprotein 1 (SPP1) (SEQ ID NO: 342), B-factor, properdin (BF) (SEQ ID NO: 343-344), “homolog of Cks1=p34Cdc28/Cdc2-associated protein” (CKS1) (SEQ ID NO: 345-347), matrix metalloproteinase 7 (MMP7) (SEQ ID NO: 348-349), paired box gene 8 (PAX8) (SEQ ID NO: 350-351), serine protease inhibitor, Kunitz type, 2 (SPINT2) (SEQ ID NO: 352-353), ZW10 interactor (ZWINT) (SEQ ID NO: 354), diacylglycerol kinase (DGKH) (SEQ ID NO: 355), high-mobility group (nonhistone chromosomal) protein isoforms I and Y (HMG1Y) (SEQ ID NO: 356), Syndecan-4-amphiglycan-ryudocan core protein (SDC4) (SEQ ID NO: 357-359), cyclin-dependent kinase inhibitor 2A (CDKN2A) (SEQ ID NO: 360), sodium channel, nonvoltage-gated 1 alpha (SCNN1A) (SEQ ID NO: 361-362), lactate dehydrogenase A (LDHA) (SEQ ID NO: 363), adult folate receptor (FOLR1) (SEQ ID NO: 364-365), Triosephosphate isomerase 1 (TP11) (SEQ ID NO: 366-367), kallikrein 8 (neuropsin/ovasin) (KLK8) (SEQ ID NO: 368), CXC chemokine receptor 4-fusin-neuropeptide Y receptor-L3 (CXCR4) (SEQ ID NO: 200), kinesin-like 1 (KNSL1) (SEQ ID NO: 369-370), H2A histone family, member O (H2AFO) (SEQ ID NO: 371-372), major histocompatibility complex, class II, DR alpha, HLA-DRA, cysteine-rich protein 1 (intestinal) (CR1P1) (SEQ ID NO: 375), pyrophosphatase (inorganic), (PP) (SEQ ID NO: 376), EST 666391, glucose transporter (HepG2) (SLC2A1) (SEQ ID NO: 379-381), EST 897770, hepatoma-derived growth factor (HDGF) (SEQ ID NO: 383-385), argininosuccinate synthetase (ASS) (SEQ ID NO: 386), claudin 4 (CLDN4) (SEQ ID NO: 387-388), preferentially expressed antigen in melanoma (PRAME) (SEQ ID NO: 389), LAR=LCA-homologue (PTPRF) (SEQ ID NO: 390-391), eyes absent (Drosophila) homolog 2 (EYA2) (SEQ ID NO: 392-393), L-myc (MYCL1) (SEQ ID NO: 394-396), STAT1=IFN alpha/beta-responsive transcription factor ISGF3 beta subunits (p91/p84) (STAT1) (SEQ ID NO: 397-399), mitochondrial carrier homolog 2 (MTCH2) (SEQ ID NO: 400-401), 5-hydroxytryptamine (serotonin) receptor 3A (HTR3A) (SEQ ID NO: 402), cyclin E1 (CCNE1) (SEQ ID NO: 403-404), cadherin 6, type 2, K-cadherin (fetal kidney) (CDH6) (SEQ ID NO: 405), 5′-AMP-activated protein kinase-gamma-1 subunit (PRKA4G) (SEQ ID NO: 406408), defensin beta 1 (DEFB1) (SEQ ID NO: 409), actin related protein ⅔ complex, subunit 1A (41 kD) (ARPC1B) (SEQ ID NO: 410-411), PKC iota=Protein kinase C, iota (PRKC1) (SEQ ID NO: 412-414), glyceraldehyde-3-phosphate dehydrogenase (GAPD) (SEQ ID NO: 415), complement component 2 (C2) (SEQ ID NO: 416-417), H2A histone family, member Y (H2AFY) (SEQ ID NO: 418-419), transmembrane 4 superfamily member 1 (TM4SF1) (SEQ ID NO: 420-421), glyceraldehyde-3-phosphate dehydrogenase (GAPD) (SEQ ID NO: 422-423), Interferon-inducible protein 1-8U (IFITM3) (SEQ ID NO: 424-426), glycine dehydrogenase (decarboxylating; glycine decarboxylase, glycine cleavage system protein P) (GLDC) (SEQ ID NO: 427-428), calumenin (CALU) (SEQ ID NO: 429-430), hemoglobin alpha 2 (HBA2) (SEQ ID NO: 431-432), S100 calcium-binding protein A11 (calgizzarin) (S100A11) (SEQ ID NO: 433), Lactate dehydrogenase A (LDHA) (SEQ ID NO: 434-436), ubiquitin-conjugating enzyme E2C (UBE2C) (SEQ ID NO: 437), E2F-3=pRB-binding transcription factor=KIAA0075 (E2F3) (SEQ ID NO: 438-440), E-cadherin (CDH1) (SEQ ID NO: 441-442), proteasome (prosome, macropain) activator subunit 2 (PA28 beta) (PSME2) (SEQ ID NO: 443444), OP-1=osteogenic protein in the TGF-beta family (BMP7) (SEQ ID NO: 445-447), and topoisomerase II (TOP2A) (SEQ ID NO: 448) cDNA or gene, is arranged in reverse orientation relative to the promoter sequence in the transformation vector. Other aspects of the vector may be chosen as for any other expression vector (see, e.g., Example 4).

[0271] The introduced sequence need not be a full-length human ovarian cancer-related cDNA or gene, and need not be exactly homologous to the equivalent sequence found in the cell type to be transformed. Generally, however, where the introduced sequence is of shorter length, a higher degree of homology to the ovarian cancer-related sequence likely will be needed for effective antisense suppression. The introduced antisense sequence in the vector may be at least thirty nucleotides in length, and improved antisense suppression will typically be observed as the length of the antisense sequence increases. The length of the antisense sequence in the vector advantageously may be greater than 100 nucleotides.

[0272] Although the exact mechanism by which antisense RNA molecules interfere with gene expression has not been elucidated, it is believed that antisense RNA molecules bind to the endogenous mRNA molecules and thereby inhibit translation of the endogenous mRNA.

[0273] Suppression of endogenous ovarian cancer-related gene expression can also be achieved using ribozymes. Ribozymes are synthetic RNA molecules that possess highly specific endoribonuclease activity. The production and use of ribozymes are disclosed in U.S. Pat. No. 4,987,071 to Cech and U.S. Pat. No. 5,543,508 to Haselhoff. The inclusion of ribozyme sequences within antisense RNAs may be used to confer RNA cleaving activity on the antisense RNA, such that endogenous mRNA molecules that bind to the antisense RNA are cleaved, which in turn leads to an enhanced antisense inhibition of endogenous gene expression.

[0274] In addition, dominant negative mutant forms of the disclosed ovarian cancer-related sequences may be used to block endogenous activity of the corresponding gene products.

[0275] Suppression can also be achieved using small inhibitory RNA molecules (siRNAs) (see, for instance, Caplen et al., Proc. Natl. Acad. Sci. 98(17): 9742-9747, 2001, and Elbashir et al., Nature 411: 494-498, 2001). Thus, this disclosure also encompasses siRNAs that correspond to an ovarian cancer-related nucleic acid, which siRNA is capable of suppressing the expression or function of its cognate (target) ovarian cancer-related protein. Also encompassed are methods of suppressing the expression or activity of an ovarian cancer-related molecule using an siRNA.

[0276] Suppression of expression of an ovarian cancer-related gene can be used, for instance, to treat, reduce, or prevent cell proliferative and other disorders caused by over-expression or unregulated expression of the corresponding ovarian cancer-related gene. In particular, suppression of expression of sequences disclosed herein as being up-regulated in ovarian cancer can be used to treat, reduce, or prevent progression to a later stage of ovarian cancer.

### EXAMPLE 7

### Nucleic Acid-Based Analysis

[0277] This example describes how to use the ovarian cancer-related nucleic acids disclosed herein to detect and analyze neoplasms and mutations in ovarian cancer-related nucleic acids that may result in neoplasms.

[0278] The ovarian cancer-related nucleic acid molecules provided herein, and combinations of these molecules, can be used in methods of genetic testing for neoplasms (e.g., ovarian or other cancers) or predisposition to neoplasms owing to altered expression of ovarian cancer-related nucleic acid molecules (e.g., deletion, genomic amplification or mutation, or over- or under-expression in comparison to a control or baseline). For such procedures, a biological sample of the subject, which biological sample contains either DNA or RNA derived from the subject, is assayed for a mutated, amplified or deleted ovarian cancer-related nucleic acid molecule, or for over- or under-expression of an ovarian cancer-related nucleic acid molecule. Suitable biological samples include samples containing genomic DNA or RNA (including mRNA), obtained from body cells of a subject, such as those present in peripheral blood, urine, saliva, tissue biopsy, surgical specimen, amniocentesis samples and autopsy material.

[0279] The detection in the biological sample of a mutant ovarian cancer-related nucleic acid molecule, a mutant ovarian cancer-related RNA, an amplified or homozygously or heterozygously deleted ovarian cancer-related nucleic acid molecule, or over- or under-expression of an ovarian cancer-related nucleic acid molecule, may be performed by a number of methodologies, examples of which are provided.

[0280] A. Detection of Unknown Mutations:

[0281] Unknown mutations in ovarian cancer-related nucleic acid molecules can be identified through polymerase chain reaction amplification of reverse transcribed RNA (RT-PCR) or DNA isolated from breast or ovary or other tissue, followed by direct DNA sequence determination of the products; single-strand conformational polymorphism analysis (SSCP) (for instance, see Hongyo et al., Nucleic Acids Res. 21:3637-3642, 1993); chemical cleavage (including HOT cleavage) (Bateman et al., Am. J. Med. Genet. 45:233-240, 1993; reviewed in Ellis et al., Hum. Mutat. 11:345-353, 1998); denaturing gradient gel electrophoresis (DGGE); ligation amplification mismatch protection (LAMP); or enzymatic mutation scanning (Taylor and Deeble, Genet. Anal. 14:181-186, 1999), followed by direct sequencing of amplicons with putative sequence variations.

[0282] B. Detection of Known Mutations:

[0283] The detection of specific known DNA mutations in ovarian cancer-related nucleic acid molecules may be achieved by methods such as hybridization using allele specific oligonucleotides (ASOs) (see Wallace et al., CSHL Symp. Quant. Biol. 51:257-261, 1986), direct DNA sequencing (see Church and Gilbert. Proc. Natl. Acad. Sci. USA 81:1991-1995, 1988), the use of restriction enzymes (see Flavell et al., Cell 15:25, 1978; Geever et al., Proc. Natl. Acad. Sci. U.S.A. 8(8): 5081-5085, 1981), discrimination on the basis of electrophoretic mobility in gels with denaturing reagent (see Myers and Maniatis, Cold Spring Harbor Symp. Quant. Biol. 51:275-284, 1986), RNase protection (see Myers et al., Science 230:1242, 1985), chemical cleavage (see Cotton et al., Proc. Nail. Acad. Sci. USA 85:4397-4401, 1985), and the ligase-mediated detection procedure (see Landegren et al., Science 241:1077-1080, 1988). Oligonucleotides specific to normal or mutant MB1 sequences can be chemically synthesized using commercially available machines. These oligonucleotides can then be labeled radioactively with isotopes (such as ³²P) or non-radioactively, with tags such as biotin (see Ward and Langer et al., Proc. Nail. Acad. Sci. USA 78:6633-6657, 1981), and hybridized to individual DNA samples immobilized on membranes or other solid supports by dot-blot or transfer from gels after electrophoresis. These specific sequences are visualized by methods such as autoradiography or fluorometric (see Landegren et al., Science 242:229-237, 1989) or colorimetric reactions (see Gebeyehu et al., Nucleic Acids Res. 15:4513-4534, 1987). Using an ASO specific for a normal allele, the absence of hybridization would indicate a mutation in the particular region of the gene, or deleted MB I gene. In contrast, if an ASO specific for a mutant allele hybridizes to a clinical sample then that would indicate the presence of a mutation in the region defined by the ASO.

[0284] C. Detection of Genomic Amplification or Deletion

[0285] Gene dosage (copy number) can be important in neoplasms; it is therefore advantageous to determine the number of copies of ovarian cancer-related nucleic acids in biological samples of a subject, e.g., serum or ovary samples. Probes generated from the disclosed encoding sequence of in ovarian cancer-related nucleic acid molecules can be used to investigate and measure genomic dosage of the corresponding ovarian cancer-related genomic sequence.

[0286] Appropriate techniques for measuring gene dosage are known in the art; see for instance, U.S. Pat. No. 5,569,753 (“Cancer Detection Probes”) and Pinkel et al. (Nat. Genet. 20:207-211, 1998) (“High Resolution Analysis of DNA Copy Number Variation using Comparative Genomic Hybridization to Microarrays”).

[0287] Determination of gene copy number in cells of a patient-derived sample using other techniques is known in the art. For example, amplification of an ovarian cancer-related nucleic acid sequence in cancer-derived cell lines as well as uncultured ovarian cancer or other cells can be carried out using bicolor FISH analysis. By way of example, interphase FISH analysis of breast cancer cell lines can be carried out as previously described (see Barlund et al., Genes Chromo. Cancer 20:372-376, 1997). The hybridizations can be evaluated using a Zeiss fluorescence microscope.

[0288] For tissue microarrays, the FISH can be performed as described in Kononen et al. (Nat. Med. 4:844-847, 1998). Briefly, consecutive sections of the array are deparaffinized, dehydrated in ethanol, denatured at 74° C. for 5 minutes in 70% formamide/2×SSC, and hybridized with test and reference probes. The specimens containing tight clusters of signals or >3-fold increase in the number of test probe as compared to chromosome 17 centromere in at least 10% of the tumor cells may be considered as amplified. Microarrays can be constructed as described in WO 99/44063A2 and WO 99/44062A1.

[0289] C. Detection of mRNA Expression Levels

[0290] Altered expression of an ovarian cancer-related molecule also can be detected by measuring the cellular level of ovarian cancer-related nucleic acid molecule-specific mRNA. mRNA can be measured using techniques well known in the art, including for instance Northern analysis, RT-PCR and mRNA in situ hybridization. Details of mRNA analysis procedures can be found, for instance, in Example 1, Example 3, and Sambrook et al. (ed.), Molecular Cloning. A Laboratory Manual, 2nd ed., vol. 1-3, Cold Spring Harbor Laboratory Press, Cold Spring Harbor, N.Y., 1989.

[0291] The nucleic acid-based diagnostic methods of this disclosure are predictive of ovarian cancer. Cells of any tumors that demonstrate altered expression levels (e.g., through genomic amplification, deletion, mutation, or other over- or under-expression) of nucleotide sequences that share homology with the ovarian cancer-related nucleic acids disclosed herein are aggressive tumor cells, and result in decreased survival, increased metastasis, increased rates of clinical, and overall worsened prognosis.

### EXAMPLE 8

### Production of Protein Specific Binding Agents

[0292] This example describes how to use the ovarian cancer-related molecules disclosed herein to produce binding agents useful in preventing ovarian cancer.

[0293] Monoclonal or polyclonal antibodies may be produced to any of the disclosed ovarian cancer-related proteins, or mutant forms of these proteins. Optimally, antibodies raised against these proteins, or peptides from within such proteins, would specifically detect the protein or peptide with which the antibodies are generated. That is, an antibody generated to the BMP7 protein or another specified protein (see Table 1) or a fragment thereof would recognize and bind that protein and would not substantially recognize or bind to other proteins found in human cells.

[0294] The determination that an antibody specifically detects a designated protein (e.g., an ovarian cancer-related protein as disclosed herein) can be made by any one of a number of standard immunoassay methods; for instance, the Western blotting technique (see Sambrook et al., In Molecular Cloning: A Laboratory Manual, CSHL, New York, 1989). To determine that a given antibody preparation (such as one produced in a mouse) specifically detects a designated protein by Western blotting, total cellular proteins are extracted from cells (for example, human ovary) and electrophoresed on a sodium dodecyl sulfate-polyacrylamide gel. The proteins are then transferred to a membrane (for example, nitrocellulose) by Western blotting, and the antibody preparation is incubated with the membrane. After washing the membrane to remove non-specifically bound antibodies, the presence of specifically bound antibodies is detected by the use of an anti-mouse antibody conjugated to an enzyme such as alkaline phosphatase. Application of an alkaline phosphatase substrate 5-bromo-4-chloro-3-indolyl phosphate/nitro blue tetrazolium results in the production of a dense blue compound by immunolocalized alkaline phosphatase. Antibodies that specifically detect the designated protein will, by this technique, be shown to bind to the designated protein band (which will be localized at a given position on the gel determined by its molecular weight). Non-specific binding of the antibody to other proteins may occur and may be detectable as a weak signal on the Western blot. The non-specific nature of this binding will be recognized by one skilled in the art by the weak signal obtained on the Western blot relative to the strong primary signal arising from the specific antibody-protein binding.

[0295] Substantially pure ovarian cancer-related protein or protein fragment (peptide) suitable for use as an immunogen may be isolated from transfected or transformed cells, as described above. Concentration of protein or peptide in the final preparation is adjusted, for example, by concentration on an Amicon filter device, to the level of a few micrograms per milliliter. Monoclonal or polyclonal antibody to the protein can then be prepared as follows:

[0296] A. Monoclonal Antibody Production by Hybridoma Fusion

[0297] Monoclonal antibody to epitopes of a designated protein (such as an ovarian cancer-related protein, including one encoded by a nucleic acid listed in Table 1) identified and isolated as described can be prepared from murine hybridomas according to the classical method of Kohler and Milstein (Nature 256:495-497, 1975) or derivative methods thereof Briefly, a mouse is repetitively inoculated with a few micrograms of the selected protein over a period of a few weeks. The mouse is then sacrificed, and the antibody-producing cells of the spleen isolated. The spleen cells are fused by means of polyethylene glycol with mouse myeloma cells, and the excess un-fused cells destroyed by growth of the system on selective media comprising aminopterin (HAT media). The successfully fused cells are diluted and aliquots of the dilution placed in wells of a microtiter plate where growth of the culture is continued. Antibody-producing clones are identified by detection of antibody in the supernatant fluid of the wells by immunoassay procedures, such as ELISA, as originally described by Engvall (Meth. Enzymol. 70: 419-439, 1980), and derivative methods thereof. Selected positive clones can be expanded and their monoclonal antibody product harvested for use. Detailed procedures for monoclonal antibody production are described in Harlow and Lane (Antibodies, A Laboratory Manual, CSHL, New York, 1988).

[0298] B. Polyclonal Antibody Production by Immunization

[0299] Polyclonal antiserum containing antibodies to heterogeneous epitopes of a single protein can be prepared by immunizing suitable animals with the expressed protein, which can be unmodified or modified to enhance immunogenicity. Effective polyclonal antibody production is affected by many factors related both to the antigen and the host species. For example, small molecules tend to be less immunogenic than others and may require the use of carriers and adjuvant. Also, host animals vary in response to site of inoculations and dose, with either inadequate or excessive doses of antigen resulting in low titer antisera. Small doses (ng level) of antigen administered at multiple intradermal sites appear to be most reliable. An effective immunization protocol for rabbits can be found in Vaitukaitis et al. (J. Clin. Endocrinol. Metab. 33: 988-991, 1971).

[0300] Booster injections can be given at regular intervals, and antiserum harvested when antibody titer thereof, as determined semi-quantitatively, for example, by double immunodiffusion in agar against known concentrations of the antigen, begins to fall. See, for example, Ouchterlony et al. (In Handbook of Experimental Immunology, Wier (ed.) Chapter 19. Blackwell, 1973). Plateau concentration of antibody is usually in the range of about 0.1 to 0.2 mg/ml of serum (about 12 μM). Affinity of the antisera for the antigen is determined by preparing competitive binding curves, as described, for example, by Fisher (Manual of Clinical Immunology, Ch. 42, 1980).

[0301] C. Antibodies Raised against Synthetic Peptides

[0302] A third approach to raising antibodies against the subject ovarian cancer-related proteins or peptides is to use one or more synthetic peptides synthesized on a commercially available peptide synthesizer based upon the predicted amino acid sequence of the desired ovarian cancer-related protein or peptide.

[0303] D. Antibodies Raised by Injection of Protein Encoding Sequence

[0304] Antibodies also may be raised against proteins and peptides related to ovarian cancer as described herein by subcutaneous injection of a DNA vector that expresses the desired ovarian cancer-related protein, or a fragment thereof, into laboratory animals, such as mice. Delivery of the recombinant vector into the animals may be achieved using a hand-held form of the Biolistic system (see Sanford et al., Particulate Sci. Technol. 5:27-37, 1987) as described by Tang et al. (Nature 356:152-154, 1992). Expression vectors suitable for this purpose may include those that express the ovarian cancer-related sequence under the transcriptional control of either the human β-actin promoter or the cytomegalovirus (CMV) promoter.

[0305] Antibody preparations prepared according to these protocols are useful in quantitative immunoassays that determine concentrations of antigen-bearing substances in biological samples; they also can be used semi-quantitatively or qualitatively to identify the presence of antigen in a biological sample; or for immunolocalization of the corresponding ovarian cancer-related protein.

[0306] For administration to human patients, antibodies, e.g., ovarian cancer-related protein specific monoclonal antibodies (such as antibodies to the proteins encoded by the encoding sequences listed to in Table 1), can be humanized by methods known in the art. Antibodies with a desired binding specificity can be commercially humanized (Scotgene, Scotland, UK; Oxford Molecular, Palo Alto, Calif.). Alternatively, human antibodies can be produced. Methods for producing human antibodies are known in the art; see, for instance, Canevari et al., Int. J. Biol. Markers 8:147-150, 1993 and Green, J. Immunol. Meth. 231:11-23, 1999, for instance.

### EXAMPLE 9

### Protein-Based Analysis

[0307] This example describes how to use the ovarian cancer-related molecules disclosed herein to quantitate the level of one or more ovarian cancer-related proteins in a subject.

[0308] An alternative method of diagnosing, staging, detecting, or predicting ovarian cancer is to quantitate the level of one or more ovarian cancer-related proteins in a subject, for instance in the cells of the subject. This diagnostic tool is useful for detecting reduced or increased levels of ovarian cancer-related proteins. Localization and/or coordinated expression (temporally or spatially) of ovarian cancer-related proteins can also be examined using well known techniques. The determination of reduced or increased ovarian cancer-related protein levels, in comparison to such expression in a normal subject (e.g., a subject not having ovarian cancer or not having a predisposition developing this condition, disease or disorder, would be an alternative or supplemental approach to the direct determination of ovarian cancer-related nucleic acid levels by the methods outlined above and equivalents. The availability of antibodies specific to specific ovarian cancer-related protein(s) will facilitate the detection and quantitation of cellular ovarian cancer-related protein(s) by one of a number of immunoassay methods which are well known in the art and are presented in Harlow and Lane (Antibodies, A Laboratory Manual, CSHL, New York, 1988). Methods of constructing such antibodies are discussed above, in Example 7.

[0309] Any standard immunoassay format (e.g., ELISA, Western blot, or RIA assay) can be used to measure altered expression of ovarian cancer-related polypeptide or protein levels; comparison is to wild-type (normal) ovarian cancer-related protein levels, and a difference in ovarian cancer-related polypeptide levels is indicative of a biological condition resulting from altered expression of ovarian cancer-related polypeptides or proteins, such as neoplasia. Whether the key difference is an increase or a decrease is dependent on the specific ovarian cancer-related protein under examination, as discussed herein. Immunohistochemical techniques may also be utilized for ovarian cancer-related polypeptide or protein detection and quantification. For example, a tissue sample may be obtained from a subject, and a section stained for the presence of an ovarian cancer-related protein using the appropriate ovarian cancer-related protein specific binding agent and any standard detection system (e.g., one which includes a secondary antibody conjugated to horseradish peroxidase). General guidance regarding such techniques can be found in, e.g., Bancroft and Stevens (Theory and Practice of Histological Techniques, Churchill Livingstone, 1982) and Ausubel et al. (Current Protocols in Molecular Biology, John Wiley & Sons, New York, 1998).

[0310] For the purposes of quantitating an ovarian cancer-related protein, a biological sample of the subject, which sample includes cellular proteins, is required. Such a biological sample may be obtained from body cells, such as those present in peripheral blood, urine, saliva, tissue biopsy, amniocentesis samples, surgical specimens and autopsy material, particularly breast cells. Quantitation of an ovarian cancer-related protein can be achieved by immunoassay and the amount compared to levels of the protein found in healthy cells. A significant difference (either increase or decrease) in the amount of ovarian cancer-related protein in the cells of a subject compared to the amount of the same ovarian cancer-related protein found in normal human cells is usually about a 10% or greater change, for instance 20%, 30%, 40%, 50% or greater difference. Substantial under- or over-expression of one or more ovarian cancer-related protein(s), may be indicative of neoplasia or a predilection to neoplasia or metastasis, and especially ovarian epithelial cancer.

[0311] The protein-based diagnostic methods as described herein are predictive of ovarian cancer. Cells of any tumors that demonstrate altered expression levels (e.g., through genomic amplification, deletion, mutation, or other over- or under-expression) of nucleotide sequences that share homology with the ovarian cancer-related nucleic acids disclosed herein are aggressive tumor cells, and result in decreased survival, increased metastasis, increased rates of clinical recurrence, and overall worsened prognosis.

### EXAMPLE 10

### Gene Therapy

[0312] This example describes how to use the ovarian cancer-related molecules and analysis methods disclosed herein to effect gene therapy for the treatment of ovarian cancer.

[0313] Gene therapy approaches for combating neoplasia (particularly ovarian cancer) in subjects are made possible by the present disclosure.

[0314] Retroviruses have been considered a preferred vector for experiments in gene therapy, with a high efficiency of infection and stable integration and expression (see Orkin et al., Prog. Med. Genet. 7:130-142, 1988). A full-length ovarian cancer-related gene or cDNA can be cloned into a retroviral vector and driven from either its endogenous promoter or from the retroviral LTR (long terminal repeat). Other viral transfection systems may also be utilized for this type of approach, including adenovirus, adeno-associated virus (AAV) (see McLaughlin et al., J. Virol. 62:1963-1973, 1988), Vaccinia virus (Moss et al., Annu. Rev. Immunol. 5:305-324, 1987), Bovine Papilloma virus (Rasmussen et al., Methods Enzymol. 139:642-654, 1987) or members of the herpesvirus group such as Epstein-Barr virus (Margolskee et al., Mol. Cell. Biol. 8:2837-2847, 1988).

[0315] Developments in gene therapy techniques include the use of RNA-DNA hybrid oligonucleotides, as described by Cole-Strauss et al. (Science 273:1386-1389, 1996). This technique may allow for site-specific integration of cloned sequences, thereby permitting accurately targeted gene replacement.

[0316] In addition to delivery of ovarian cancer-related protein encoding sequences to cells using viral vectors, it is possible to use non-infectious methods of delivery. For instance, lipidic and liposome-mediated gene delivery has recently been used successfully for transfection with various genes (for reviews, see Templeton and Lasic, Mol. Biotechnol. 11:175-180, 1999; Lee and Huang, Crit. Rev. Ther. Drug Carrier Syst. 14:173-206; and Cooper, Semin. Oncol. 23:172-187, 1996). For instance, cationic liposomes have been analyzed for their ability to transfect monocytic leukemia cells, and shown to be a viable alternative to using viral vectors (de Lima et al., Mol. Membr. Biol. 16:103-109, 1999). Such cationic liposomes can also be targeted to specific cells through the inclusion of, for instance, monoclonal antibodies or other appropriate targeting ligands (see Kao et al., Cancer Gene Ther. 3:250-256, 1996).

[0317] To reduce the level of ovarian cancer-related gene expression, gene therapy can be carried out using antisense or other suppressive constructs, the construction of which is discussed above (Example 4).

### EXAMPLE 11

### Kits

[0318] This example describes various kits for using the ovarian cancer-related molecules and analysis methods disclosed herein.

[0319] Kits are provided to determine the level (or relative level) of expression of one or more species of ovarian cancer-related nucleic acids (e.g., mRNA) or one or more ovarian cancer-related protein (i.e., kits containing nucleic acid probes or antibodies or other ovarian cancer-related protein specific binding agents). Kits are also provided that contain the necessary reagents for determining gene copy number (genomic amplification or deletion), such as probes or primers specific for an ovarian cancer-related nucleic acid sequence. These kits can each include instructions, for instance instructions that provide calibration curves or charts to compare with the determined (e.g., experimentally measured) values.

[0320] A. Kits for Detection of Ovarian Cancer-Related Genomic Amplification or Deletion

[0321] The nucleotide sequence of ovarian cancer-related nucleic acid molecules disclosed herein, and fragments thereof, can be supplied in the form of a kit for use in detection of ovarian cancer-related genomic amplification/deletion and/or diagnosis of progression to or predilection to progress to ovarian epithelial cancer. In such a kit, an appropriate amount of one or more oligonucleotide primer specific for an ovarian cancer-related-sequence is provided in one or more containers. The oligonucleotide primers may be provided suspended in an aqueous solution or as a freeze-dried or lyophilized powder, for instance. The container(s) in which the oligonucleotide(s) are supplied can be any conventional container that is capable of holding the supplied form, for instance, microfuge tubes, ampoules, or bottles. In some applications, pairs of primers may be provided in pre-measured single use amounts in individual, typically disposable, tubes, or equivalent containers. With such an arrangement, the sample to be tested for the presence of ovarian cancer-related genomic amplification/deletion can be added to the individual tubes and in vitro amplification carried out directly.

[0322] The amount of each oligonucleotide primer supplied in the kit can be any amount, depending for instance on the market to which the product is directed. For instance, if the kit is adapted for research or clinical use, the amount of each oligonucleotide primer provided likely would be an amount sufficient to prime several in vitro amplification reactions. Those of ordinary skill in the art know the amount of oligonucleotide primer that is appropriate for use in a single amplification reaction. General guidelines may for instance be found in Innis et al. (PCR Protocols, A Guide to Methods and Applications, Academic Press, Inc., San Diego, Calif., 1990), Sambrook et al. (In Molecular Cloning: A Laboratory, Manual, Cold Spring Harbor, N.Y., 1989), and Ausubel et al. (In Current Protocols in Molecular Biology, John Wiley & Sons, New York, 1998).

[0323] A kit may include more than two primers, in order to facilitate the in vitro amplification of ovarian cancer-related genomic sequences (or a protein of such a sequence), for instance an ovarian cancer-related nucleic acid listed in Table 1, or the 5′ or 3′ flanking region thereof.

[0324] In some embodiments, kits may also include the reagents necessary to carry out in vitro amplification reactions, including, for instance, DNA sample preparation reagents, appropriate buffers (e.g., polymerase buffer), salts (e.g., magnesium chloride), and deoxyribonucleotides (dNTPs). Written instructions may also be included.

[0325] Kits may in addition include either labeled or unlabeled oligonucleotide probes for use in detection of the in vitro amplified sequences. The appropriate sequences for such a probe will be any sequence that falls between the annealing sites of two provided oligonucleotide primers, such that the sequence the probe is complementary to is amplified during the in vitro amplification reaction (if it is present in the sample).

[0326] It may also be advantageous to provided in the kit one or more control sequences for use in the in vitro amplification reactions. The design of appropriate positive control sequences is well known to one of ordinary skill in the appropriate art.

[0327] B. Kits for Detection of mRNA Expression

[0328] Kits similar to those disclosed above for the detection of ovarian cancer-related genomic amplification/deletion can be used to detect ovarian cancer-related mRNA expression levels (including over- or under-expression, in comparison to the expression level in a control sample). Such kits include an appropriate amount of one or more of the oligonucleotide primers for use in, for instance, reverse transcription PCR reactions, similarly to those provided above, with art-obvious modifications for use with RNA.

[0329] In some embodiments, kits for detection of ovarian cancer-related mRNA expression may also include reagents necessary to carry out RT-PCR or other in vitro amplification reactions, including, for instance, RNA sample preparation reagents (including e.g., an RNAse inhibitor), appropriate buffers (e.g., polymerase buffer), salts (e.g., magnesium chloride), and deoxyribonucleotides (dNTPs). Written instructions may also be included.

[0330] Kits may in addition include either labeled or unlabeled oligonucleotide probes for use in detection of an in vitro amplified target sequence. The appropriate sequences for such a probe will be any sequence that falls between the annealing sites of the two provided oligonucleotide primers, such that the sequence the probe is complementary to is amplified during the PCR reaction.

[0331] It may also be advantageous to provided in the kit one or more control sequences for use in the in vitro amplification reactions. The design of appropriate positive control sequences is well known to one of ordinary skill in the appropriate art.

[0332] Alternatively, kits may be provided with the necessary reagents to carry out quantitative or semi-quantitative Northern analysis of ovarian cancer-related mRNA. Such kits include, for instance, at least one ovarian cancer-related sequence-specific oligonucleotide for use as a probe. This oligonucleotide may be labeled in any conventional way, including with a selected radioactive isotope, enzyme substrate, co-factor, ligand, chemiluminescent or fluorescent agent, hapten, or enzyme.

[0333] C. Kits for Detection of Ovarian Cancer-Linked Protein or Peptide Expression

[0334] Kits for the detection of ovarian cancer-linked protein expression, for instance altered (over or under) expression of a protein encoded for by a nucleic acid molecule listed in Table 1 or elsewhere, are also encompassed herein. Such kits may include for example at least one target (ovarian cancer-linked) protein (e.g., all or a portion of the small cell lung carcinoma cluster 4 antigen (CD24) (SEQ ID NO: 181-182), secretory leukocyte protease inhibitor antileukoproteinase (SLP1) (SEQ ID NO: 340-341), secreted phosphoprotein 1 (SPP1) (SEQ ID NO: 342), B-factor, properdin (BF) (SEQ ID NO: 343-344), “homolog of Cks1=p34Cdc28/Cdc2-associated protein” (CKS1) (SEQ ID NO: 345-347), matrix metalloproteinase 7 (MMP7) (SEQ ID NO: 348-349), paired box gene 8 (PAX8) (SEQ ID NO: 350-351), serine protease inhibitor, Kunitz type, 2 (SPINT2) (SEQ ID NO: 352-353), ZW10 interactor (ZWINT) (SEQ ID NO: 354), diacylglycerol kinase (DGKH) (SEQ ID NO: 355), high-mobility group (nonhistone chromosomal) protein isoforms I and Y (HMG1Y) (SEQ ID NO: 356), Syndecan-4-amphiglycan-ryudocan core protein (SDC4) (SEQ ID NO: 357-359), cyclin-dependent kinase inhibitor 2A (CDKN2A) (SEQ ID NO: 360), sodium channel, nonvoltage-gated 1 alpha (SCNN1A) (SEQ ID NO: 361-362), lactate dehydrogenase A (LDHA) (SEQ ID NO: 363), adult folate receptor (FOLR1) (SEQ ID NO: 364-365), Triosephosphate isomerase 1 (TP11) (SEQ ID NO: 366-367), kallikrein 8 (neuropsin/ovasin) (KLK8) (SEQ ID NO: 368), CXC chemokine receptor 4-fusin-neuropeptide Y receptor-L3 (CXCR4) (SEQ ID NO: 200), kinesin-like 1 (KNSL1) (SEQ ID NO: 369-370), H2A histone family, member O (H2AFO) (SEQ ID NO: 371-372), major histocompatibility complex, class II, DR alpha, HLA-DRA, cysteine-rich protein 1 (intestinal) (CR1P1) (SEQ ID NO: 375), pyrophosphatase (inorganic), (PP) (SEQ ID NO: 376), EST (SEQ ID NO: 377-378) 666391, glucose transporter (HepG2), (SLC2A1) (SEQ ID NO: 379-381), EST (SEQ ID NO: 377-378) 897770, hepatoma-derived growth factor (HDGF) (SEQ ID NO: 383-385), argininosuccinate synthetase (ASS) (SEQ ID NO: 386), claudin 4 (CLDN4) (SEQ ID NO: 387-388), preferentially expressed antigen in melanoma (PRAME) (SEQ ID NO: 389), LAR=LCA-homologue (PTPRF) (SEQ ID NO: 390-391), eyes absent (Drosophila) homolog 2 (EYA2) (SEQ ID NO: 392-392), L-myc (MYCL1) (SEQ ID NO: 394-396), STAT1=IFN alpha/beta-responsive transcription factor ISGF3 beta subunits (p91/p84) (STAT1) (SEQ ID NO: 397-399), mitochondrial carrier homolog 2 (MTCH2) (SEQ ID NO: 400-401), 5-hydroxytryptamine (serotonin) receptor 3A (H7R3A (SEQ ID NO: 402), cyclin E1 (CCNE1) (SEQ ID NO: 403-404), cadherin 6, type 2, K-cadherin (fetal kidney) (CDH6) (SEQ ID NO: 405),5′-AMP-activated protein kinase-gamma-1 subunit (PRKAG1) (SEQ ID NO: 406-408), defensin beta 1 (DEFB1) (SEQ ID NO: 409), actin related protein ⅔ complex, subunit 1A (41 kD) (ARPC1B) (SEQ ID NO: 410-411), PKC iota=Protein kinase C, iota (PRKC1) (SEQ ID NO: 412-414), glyceraldehyde-3-phosphate dehydrogenase (GAPD) (SEQ ID NO: 415), complement component 2 (C2) (SEQ ID NO: 416-417), H2A histone family, member Y (H2AFY) (SEQ ID NO: 418-419), transmembrane 4 superfamily member 1 (TM4SF1) (SEQ ID NO: 420-421), glyceraldehyde-3-phosphate dehydrogenase (GAPD) (SEQ ID NO: 422-423), Interferon-inducible protein 1-8U (IFITM3) (SEQ ID NO: 424-426), glycine dehydrogenase (decarboxylating; glycine decarboxylase, glycine cleavage system protein P) (GLDC) (SEQ ID NO: 427-428), calumenin (CALU) (SEQ ID NO: 429-430), hemoglobin alpha 2 (HBA2) (SEQ ID NO: 431-432), S100 calcium-binding protein A11 (calgizzarin) (S100A11) (SEQ ID NO: 433), Lactate dehydrogenase A (LDHA) (SEQ ID NO: 434-436), ubiquitin-conjugating enzyme E2C (UBE2C) (SEQ ID NO: 437), E2F-3=pRB-binding transcription factor=KIAA0075 (E2F3) (SEQ ID NO: 438-440), E-cadherin (CDH1) (SEQ ID NO: 441-442), proteasome (prosome, macropain) activator subunit 2 (PA28 beta) (PSME2) (SEQ ID NO: 443-444), OP-1=osteogenic protein in the TGF-beta family (BMP7) (SEQ ID NO: 445-447), or topoisomerase II (TOP2A) (SEQ ID NO: 448) specific binding agent (e.g., a polyclonal or monoclonal antibody or antibody fragment), and may include at least one control. The ovarian cancer-linked protein specific binding agent and control may be contained in separate containers. The kits may also include a means for detecting ovarian cancer-related protein:agent complexes, for instance the agent may be detectably labeled. If the detectable agent is not labeled, it may be detected by second antibodies or protein A, for example, either of both of which also may be provided in some kits in one or more separate containers. Such techniques are well known.

[0335] Additional components in some kits include instructions for carrying out the assay. Instructions will allow the tester to determine whether ovarian cancer-linked expression levels are elevated or reduced in comparison to a control sample. Reaction vessels and auxiliary reagents such as chromogens, buffers, enzymes, etc. also may be included in the kits.

### EXAMPLE 12

### Identification of Therapeutic Compounds

[0336] This example describes how to use the ovarian cancer-related molecules disclosed herein to identify compounds for potential therapeutic use in treating, reducing, or preventing ovarian cancer or development or progression of ovarian cancer.

[0337] The ovarian cancer-related molecules disclosed herein, and more particularly the linkage of these molecules to cancer, can be used to identify compounds that are useful in treating, reducing, or preventing ovarian cancer or development or progression of ovarian cancer. These molecules can be used alone or in combination, for instance in sets of two or more that are linked to cancer or cancer progression.

[0338] By way of example, a test compound is applied to a cell, for instance a test cell, and at least one ovarian cancer-related molecule level and/or activity in the cell is measured and compared to the equivalent measurement from a test cell (or from the same cell prior to application of the test compound). If application of the compound alters the level and/or activity of an ovarian cancer-related molecule (for instance by increasing or decreasing that level), then that compound is selected as a likely candidate for further characterization. In particular examples, a test agent that opposes or inhibits an ovarian cancer-related change is selected for further study, for example by exposing the agent to an ovarian epithelial cancer cell in vitro, to determine whether in vitro growth is inhibited. Such identified compounds may be useful in treating, reducing, or preventing ovarian cancer or development or progression of ovarian cancer. In particular embodiments, the compound isolated will inhibit or inactivate an ovarian cancer-related molecule, for instance those represented by the nucleic acids listed in Table 1.

[0339] Methods for identifying such compounds optionally can include the generation of an ovarian cancer-related gene expression profile, as described herein. Control gene expression profiles useful for comparison in such methods may be constructed from normal ovarian tissue, including primary ovarian cancer tissue.

### EXAMPLE 12

### Gene Expression Profiles (Fingerprints)

[0340] This example describes how to use the ovarian cancer-related nucleic acids and analysis methods disclosed herein to generate and use gene expression profiles, or “fingerprints.”

[0341] With the provision herein of methods for determining molecules that are linked to ovarian cancer, and the provision of a large collection of such ovarian cancer-linked molecules (as represented for instance by those listed in Table 1), gene expression profiles that provide information on the ovarian cancer-state of a subject are now enabled.

[0342] Ovarian cancer-related expression profiles comprise the distinct and identifiable pattern of expression (or level) of sets of ovarian cancer-related genes, for instance a pattern of high and low expression of a defined set of genes, or molecules that can be correlated to such genes, such as mRNA levels or protein levels or activities. Useful sets of molecules for constructing nucleic acid expression profiles include at least one that is represented by the following genes and ESTs: BCKDHB (SEQ ID NO: 16-17), ZNF33A (SEQ ID NO: 20-22), EST 192198 (SEQ ID NO: 25), EST 128738 (SEQ ID NO: 26-27), EST 429211 (28-29), FLJ22174 (SEQ ID NO: 30-31). EST 41556 (SEQ ID NO: 32-33), EST 296488 (SEQ ID NO: 34-35), EST 120124 (SEQ ID NO: 36-37), EST 132142 (SEQ ID NO: 38-39), EST 50635 (SEQ ID NO: 40), POR (SEQ ID NO: 41-43), EST 73702 (SEQ ID NO: 46-47), EST 2218314 (SEQ ID NO: 48), EST 2261113 (SEQ ID NO: 49), IFITM1 (SEQ ID NO: 50-54), IFITM2 (SEQ ID NO: 55-59), KIAA0203 (SEQ ID NO: 61-62). GIP3 (SEQ ID NO: 68-69). BST2 (SEQ ID NO: 70-72), EST 1384797 (SEQ ID NO: 196), TLR3 (SEQ ID NO: 199-201), SPON1 (SEQ ID NO: 160-161), HSRNASEB (SEQ ID NO: 162-163), EST 294506 (SEQ ID NO: 146-148), SORL1 (SEQ ID NO: 149-151), SIAT1 (SEQ ID NO: 73), PL1 (SEQ ID NO: 77), EST 108422 (SEQ ID NO: 78-79), CEBPG (SEQ ID NO: 80), HLA-DPA (SEQ ID NO: 97-99), H2AFL (SEQ ID NO: 107-109). IGKC (SEQ ID NO: 112-116), SCYB10 (SEQ ID NO: 120-121), RGS1 (SEQ ID NO: 122-126), LSR68 (SEQ ID NO: 168), SGK (SEQ ID NO: 176-178), and ZFP36 (SEQ ID NO: 167-173). These genes and ESTs, which have not previously been correlated with cancer, present potentially useful novel markers for cancer, and in particular, ovarian cancer.

[0343] A second example set of molecules that could be used in a profile would include at least one that is represented by (or correlated to) the genes and ESTs represented by the SEQ ID NOs in Table 9. These nucleic acids, which are disclosed herein to be differentially expressed in ovarian cancer (see FIG. 2), are suitable for markers to diagnose, prognose, and monitor ovarian cancer in a subject. In addition, these genes and ESTs are potentially useful as markers for classifying tumors into types, for instance into BRCA1-type or BRCA2-type tumors, using the methods disclosed herein.

[0344] A third example set of molecules that could be used in a profile would include at least one that is represented by (or correlated to) the genes and ESTs represented by SEQ ID NOs: 417, 284, 285, 281, 283, 278, 273, 282, 274. These represent markers disclosed herein that were found to be differentially expressed between BRCA1-Linked and sporadic tumors in a comparison to reference Immortalized Ovarian Epithelial Cells (IOSE). These markers are useful for classifying tumors into BRCA1-linked and sporadic types, and present potential targets for treatment of ovarian cancer.

[0345] A fourth example set of molecules that could be used in a profile would include at least one that is represented by (or correlated to) the genes and ESTs represented by SEQ ID NOs: 279-280, which, as disclosed herein, are markers that were found to be differentially expressed between BRCA2-Linked and sporadic tumors in a comparison to reference Immortalized Ovarian Epithelial Cells. These markers are useful for classifying tumors into BRCA2-linked and sporadic types, and present potential targets for treatment of ovarian cancer.

[0346] A fifth example set of molecules that could be used in a profile would include at least one that is represented by (or correlated to) the genes and ESTs represented by SEQ ID NOs: 281, 282 and 274, which, as disclosed herein, are markers that were found to be differentially expressed between combined BRCA-Linked and sporadic tumors in a comparison to reference Immortalized Ovarian Epithelial Cells. These markers are useful for classifying tumors into BRCA-linked and sporadic types, and present potential targets for treatment of ovarian cancer.

[0347] A sixth example set of molecules that could be used in a profile would include at least one that is represented by (or correlated to) the genes and ESTs represented by the SEQ ID NOs set forth in Table 10, which, as disclosed herein, are markers that can be used to segregate BRCA1-linked from BRCA2-linked tumor types using compound covariate prediction analysis. These markers are useful for classifying tumors into one of two types of tumors, which provides information helpful to a clinician in choosing a course of treatment for the patient based on the type of tumor into which the sample is classified.

[0348] A seventh example set of molecules that could be used in a profile would include at least one that is represented by (or correlated to) the genes and ESTs represented by SEQ ID NO: 16-201, 565-567, and 803-804. These genes and ESTs were found, as disclosed herein, to be differentially expressed in a comparison of BRCA1-linked and BRCA2-linked to sporadic tumors. Hence, these genes and ESTs present potentially useful markers for classifying tumors into types, using the methods disclosed herein. Furthermore, they represent potential targets for pharmaceutical treatment of tumors of each respective tumor type.

[0349] A eighth example set of molecules that could be used in a profile would include at least one that is represented by (or correlated to) the genes and ESTs represented by SEQ ID NOs: 124-126, 319, 429-430, 504-523, 533-535, 544, and 548-799. As disclosed herein, these nucleic acids were found to be overexpressed in a comparison of BRCA1-linked, BRCA2-linked and sporadic tumor samples. Hence, these genes and ESTs present potentially useful markers for classifying tumors into types, using the methods disclosed herein. Furthermore, they represent potential targets for pharmaceutical treatment of tumors of each respective tumor type.

[0350] A ninth example set of molecules that could be used in a profile would include at least one that is represented by (or correlated to) the genes and ESTs represented by SEQ ID NOs: 202-339. As disclosed herein, these nucleic acids were found to be overexpressed in ovarian cancer in a comparison of ovarian epithelial cancer to normal postmenopausal ovarian tissue. Hence, these genes and ESTs present potentially useful markers diagnosis, prognosis, and monitoring of ovarian cancer. In addition, they represent potential targets for pharmaceutical treatment of ovarian tumors.

[0351] A tenth example set of molecules that could be used in a profile would include at least one that is represented by (or correlated to) the genes and ESTs represented by SEQ ID NOs:97 and 340-448. As disclosed herein, these nucleic acids were found to be underexpressed in ovarian cancer in a comparison of ovarian epithelial cancer to normal postmenopausal ovarian tissue. Hence, these genes and ESTs present potentially useful markers diagnosis, prognosis, and monitoring of ovarian cancer. In addition, they represent potential targets for pharmaceutical treatment of ovarian tumors.

[0352] In other examples of ovarian cancer-related gene expression profiles, such profiles may be further broken down by the manner of molecules included in the profile. Thus, certain examples of profiles may include a specific class of ovarian cancer markers, such as those molecules involved in cell cycle control.

[0353] Particular profiles may be specific for a particular stage of normal tissue (e.g., ovarian tissue) growth or disease progression (e.g., progression of ovarian cancer). Thus, gene expression profiles can be established for a pre-ovarian cancer tissue (i.e., normal ovarian tissue), and a primary ovarian cancer tissue. Each of these profiles includes information on the expression level of at least one, but usually two or more, genes that are linked to ovarian cancer (e.g., ovarian cancer-related genes). Such information can include relative as well as absolute expression levels of specific genes. Likewise, the value measured may be the relative or absolute level of protein expression, which can be correlated with a “gene expression level.” Results from the gene expression profiles of an individual subject are often viewed in the context of a test sample compared to a baseline or control sample fingerprint.

[0354] The levels of molecules that make up a gene expression profile can be measured in any of various known ways, which may be specific for the type of molecule being measured. Thus, nucleic acid levels (such as direct gene expression levels, such as the level of mRNA expression) can be measured using specific nucleic acid hybridization reactions. Protein levels may be measured using standard protein assays, using immunologic-based assays (such as ELISAs and related techniques), or using activity assays, for instance. Examples for measuring nucleic acid and protein levels are provided herein; other methods are well known to those of ordinary skill in the art.

[0355] Examples of ovarian cancer-related gene expression profiles can be in array format, such as a nucleotide (e.g., polynucleotide) or protein array or microarray. The use of arrays to determine the presence and/or level of a collection of biological macromolecules is now well known (see, for example, methods described in published PCT application number WO9948916, describing hypoxia-related gene expression arrays). In array-based measurement methods, an array may be contacted with polynucleotides (in the case of a nucleic acid-based array) or polypeptides (in the case of a protein-based array) from a sample from a subject. The amount and/or position of binding of the subject's polynucleotides or polypeptides then can be determined, for instance to produce a gene expression profile for that subject. Such gene expression profile can be compared to another gene expression profile, for instance a control gene expression profile from a subject having a known gynecological or ovary-related condition. Optionally, the subject's gene expression profile can be correlated with one or more appropriate treatments, which may be correlated with a control (or set of control) expression profiles for stages of ovarian cancer, for instance.

[0356] This disclosure provides the identification of ovarian cancer-related molecules that exhibit alterations in expression during development of ovarian cancer, and expression fingerprints (profiles) specific for ovarian cancers. It further provides methods of using these identified nucleic acid molecules, and proteins encoded thereby, and expression fingerprints or profiles, for instance to predict and/or diagnose ovarian cancer, and to elect treatments for instance based on likely response. These identified ovarian cancer-related molecules also can serve as therapeutic targets, and can be used in methods for identifying, developing and testing therapeutic compounds. It will be apparent that the precise details of the methods described may be varied or modified without departing from the spirit of the described invention. We claim all such modifications and variations that fall within the scope and spirit of the claims below.

### Addendum

[0357] TABLE 1
Markers that were Differentially Expressed in a cDNA Microarray
Expression Profile of Sixty-One Ovarian Cancer Tumors

| | | | | Gen Bank | |
|---|---|---|---|---|---|
| SEQ ID | | IMAGE | UniGene | Accession | |
| NO. | Gene | ID No. | No. | No. | Gene Description |
| 16-17 | BCKDHB | 770835 | | AA427739; | Branched chain keto acid dehydrogenase |
| | | | | AA434304 | E1, beta polypeptide (maple syrup urine |
| | | | | | disease) |
| 18-19 | SERPINF2 | 82195 | | T68859; | serine (or cysteine) |
| | | | | T68934 | proteinase inhibitor, clade F (alpha-2 |
| | | | | | antiplasmin, pigment epithelium derived |
| | | | | | factor), mem |
| 20-22 | ZNF33A | 346902 | | D31763; | KIAA0065 |
| | | | | W78164; | |
| | | | | W79207 | |
| 23-24 | ZNF33A | 246543 | | N57658; | Zinc finger protein 33a (KOX 31) |
| | | | | N77515 | |
| 25 | EST | 192198 | | H41144 | Unknown |
| 26-27 | EST | 128738 | | R16726; | Homo sapiens cDNA: FLJ23371 fis, |
| | | | | R09980 | clone HEP16068, highly similar to |
| | | | | | HSTFIISH Homo sapiens mRNA for trar |
| 28-29 | EST | 429211 | | AA007283; | ESTs |
| | | | | AA007282 | |
| 30-31 | FLJ22174 | 295939 | | N67034; | hypothetical protein FLJ22174 |
| | | | | W04283 | |
| 32-33 | EST | 415562 | | W80701; | Unknown |
| | | | | W78802 | |
| 34-35 | EST | 296488 | | N70208; | Unknown |
| | | | | W01059 | |
| 36-37 | EST | 120124 | | T95064; | ESTs |
| | | | | T95160 | |
| 38-39 | EST | 132142 | | R26164; | Homo sapiens cDNA: FLJ21587 fis, |
| | | | | R23610 | clone COL06946 |
| 40 | EST | 50635 | | H17921 | ESTs |
| 41-43 | POR | 234180 | | S90469; | Cytochrome P450 reductase |
| | | | | H70626; | |
| | | | | H66247 | |
| 44-45 | CLU | 725877 | | AA292226; | Clusterin (complement lysis inhibitor, |
| | | | | AA292410 | SP-40, 40, sulfated glycoprotein 2, |
| | | | | | testosterone-repressed |
| | | | | | prostate messenger |
| 46-47 | EST | 73702 | | T54544; | Unknown |
| | | | | T54585 | |
| 48 | EST | 2218314 | | AI744768 | Unknown |
| 49 | EST | 2261113 | | AI609063 | EST |
| 50-51 | IFITM1 | 755599 | | AA419251; | Interferon induced transmembrane protein |
| | | | | AA419286 | 1 (9-27) |
| 52-54 | IFITM1 | 509641 | | J04164; | Interferon-inducible protein 9-27 = |
| | | | | AA058323; | interferon-induced 17 kDa membrane |
| | | | | AA058453 | protein |
| 55-57 | IFITM2 | 624655 | | X57351; | Interferon-induced protein 1-8D |
| | | | | AA187365; | |
| | | | | AA187099 | |
| 58-59 | IFITM2 | 376520 | | AA041402; | Interferon-induced protein 1-8D |
| | | | | AA041501 | |
| 60 | HE4 | 786675 | | AA451904 | Epididymis-specific, whey-acidic protein |
| | | | | | type, four-disulfide core; putative ovarian |
| | | | | | carcinoma marker |
| 61-62 | KIAA0203 | 61008 | | T40715; | K1AA0203 gene product |
| | | | | T39659 | |
| 63-64 | IL8RB | 882183 | | M73969; | CXCR2 = IL-8 Receptor beta |
| | | | | AA480683 | |
| 65-67 | VDUP1 | 297954 | | S73591; | Brain-expressed HHCPA78 homolog = Induced in |
| | | | | N68956; | HL60 cells treated with vitamin D or |
| | | | | W00656 | cycloheximide |
| 68-69 | G1P3 | 782513 | | AA448478; | Interferon, alpha-inducible protein |
| | | | | AA432030 | (clone IFI-6-16) |
| 70-72 | BST2 | 811024 | | D28137; | Bone marrow stromal cell antigen 2 |
| | | | | AA485371; | |
| | | | | AA485528 | |
| 73 | SIAT1 | 897906 | | AA598652 | Sialyltransferase 1 (beta-galactoside |
| | | | | | alpha-2,6-sialyltransferase) |
| 74-76 | DDR1 | 182288 | | U48705; | Receptor protein-tyrosine kinase |
| | | | | H41900; | EDDR1 |
| | | | | H41939 | |
| 77 | PL1 | 433573 | | AA701655 | Human endogenous retrovirus envelope |
| | | | | | region mRNA (PL1) |
| 78-79 | EST | 108422 | | T77847; | Homo sapiens, clone MGC: 12275, mRNA, |
| | | | | T77926 | complete cds |
| 80 | CEBPG | 455121 | | AA676804 | CCAAT/enhancer binding protein |
| | | | | | (C/EBP), gamma |
| 81-82 | MUC1 | 840687 | | AA488073; | Mucin 1, transmembrane |
| | | | | AA486365 | |
| 83-84 | CP | 223350 | | H86554; | ceruloplasmin (ferroxidase) |
| | | | | H86642 | |
| 85-86 | HLA-DRB5 | 811139 | | AA485739; | Major histocompatibility complex, |
| | | | | AA486460 | class II, DR beta 5 |
| 87-88 | HLA-DRB1 | 417711 | | W88967; | Major histocompatibility |
| | | | | W88546 | complex, class II, DR beta 1 |
| 89-91 | CD74 | 725751 | | X00497; | Invariant chain = la-associated invariant |
| | | | | AA399225; | gamma-chain |
| | | | | AA292218 | |
| 92-93 | CD74 | 840681 | | AA488071; | Invariant chain = la-associated invariant |
| | | | | AA486363 | gamma-chain |
| 94-96 | HLA-DRA | 117411 | | K01171; | MHC Class II = DR alpha |
| | | | | T89719; | |
| | | | | T89816 | |
| 97-99 | HLA-DPA | 207715 | | X00457; | MHC Class II = DP alpha |
| | | | | H62294; | |
| | | | | H62293 | |
| 100 | HLA-DRB1 | 855547 | | AA664195 | Major histocompatibility complex, |
| | | | | | class II, DR beta 1 |
| 101-103 | HLA-DRB1 | 470953 | | M20430; | MHC Class II = DR beta |
| | | | | AA032179; | |
| | | | | AA033653 | |
| 104-106 | TNFSF10 | 203132 | | U57059; | TRAIL = Apo-2 ligand |
| | | | | H54629; | |
| | | | | H54628 | |
| 107-109 | H2AFL | 429091 | | U90551; | Histone-2A-like protein (H2A/I) |
| | | | | AA007585; | |
| | | | | AA007574 | |
| 110-111 | IG | 66560 | | T67053; | Immunoglobulin lambda locus |
| | lambda | | | T67054 | |
| 112-114 | IGKC | 159142 | | M63438; | Immunoglobulin kappa light chain |
| | | | | R76324; | |
| | | | | R76323 | |
| 115-116 | IGKC | 840451 | | AA485725; | Immunoglobulin kappa light chain |
| | | | | AA485862 | |
| 117-119 | RAD23A | 293925 | | AF004230; | MIR-7 = monocyte/macrophage lg-related receptor |
| | | | | N63943; | AND RAD23 = UV excision repair protein |
| | | | | N98412 | (Double hit) |
| 120-121 | SCYB10 | 967284 | | X02530; | IP-10 |
| | | | | AA527139 | |
| 122-123 | RGS1 | 361323 | | AA017544; | regulator of G-protein signaling 1 |
| | | | | AA017417 | |
| 124-126 | RGS1 | 686248 | | S59049; | BL34 = RGS1 = regulator of G-protein |
| | | | | AA262268; | signaling which inhibits SDF-1 |
| | | | | AA262879 | directed B cell migration |
| 127-129 | GAS1 | 365826 | | L13698; | Growth arrest-specific 1 |
| | | | | AA025819; | |
| | | | | AA025884 | |
| 130-132 | BTG2 | 358214 | | U72649; | BTG2 = p53 dependent inducible anti- |
| | | | | W95415; | proliferative gene homologous to |
| | | | | W95512 | Pc3/Tis21 immediate early genes |
| 133-135 | FOS | 755279 | | V01512; | c-fos |
| | | | | AA496353; | |
| | | | | AA496403 | |
| 136 | LSR68 | 1862044 | | AI053597 | Lipopolysaccharide specific response-68 |
| | | | | | protein |
| 137-138 | JUNB | 309864 | | N94468; | Jun B proto-oncogene |
| | | | | W23847 | |
| 139-140 | JUNB | 122428 | | T99236; | Jun B proto-oncogene |
| | | | | T99280 | |
| 141-143 | COL3A1 | 122159 | | X14420; | Collagen Type III Alpha 1 |
| | | | | T98612; | |
| | | | | T98611 | |
| 144-145 | LUM | 813823 | | AA447781; | lumican |
| | | | | AA453712 | |
| 146-148 | EST | 294506 | | U90916; | clone 23815 mRNA |
| | | | | N71007; | |
| | | | | W01902 | |
| 149-151 | SORL1 | 279388 | | Y08110; | Mosaic protein LR11 = hybrid receptor |
| | | | | N48698; | gp250 precursor |
| | | | | N45548 | |
| 152-153 | RNASE6PL | 712341 | | AA405000; | Ribonuclease 6 precursor |
| | | | | AA281840 | |
| 154-156 | HLA-B | 769753 | | M28205; | Human Leukocyte Antigen B |
| | | | | AA429012; | |
| | | | | AA429162 | |
| 157-159 | HLA-C | 810142 | | M11886; | Human Leukocyte Antigen C |
| | | | | AA464246; | |
| | | | | AA464354 | |
| 160-161 | SPON1 | 46173 | | H09099; | Spondin 1, (f-spondin) extracellular |
| | | | | H09449 | matrix protein |
| 162-163 | HSRNASEB | 814526 | | AA459363; | RNA-binding region (RNP1, RRM) |
| | | | | AA459588 | containing 1 |
| 164-166 | ABCB1 | 813256 | | M14758; | MDR1 = Multidrug resistance protein |
| | | | | AA455911; | 1 = P-glycoprotein |
| | | | | AA456377 | |
| 167-168 | ZFP36 | 23804 | | R38383; | Zinc finger protein homologous to Zfp-36 |
| | | | | T77499 | in mouse |
| 169-171 | ZFP36 | 135880 | | M63625; | TTP = tristetraproline = GOS24 = zinc finger |
| | | | | R33813; | transcriptional regulator |
| | | | | R33812 | |
| 172-173 | ZFP36 | 727266 | | AA411987; | TTP = tristetraproline = GOS24 = zinc finger |
| | | | | AA402178 | transcriptional regulator |
| 174-175 | HGF | 41650 | | R52798; | hepatocyte growth factor (hepapoietin A; |
| | | | | R52797 | scatter factor) |
| 176-178 | SGK | 840776 | | AJ000512; | sgk = putative serine/threonine |
| | | | | AA486082; | protein kinase transcriptionally |
| | | | | AA486140 | modified during anisotonic and isotonic |
| | | | | | alteration |
| 179-180 | PPP1R7 | 814508 | | AA459351; | Protein phosphatase 1, regulatory subunit 7 |
| | | | | AA459572 | |
| 181-182 | CD24 | 204335 | | H59916; | CD24 antigen (small cell lung carcinoma |
| | | | | H59915 | cluster 4 antigen) |
| 183-184 | TPD52 | 814306 | | AA459100; | Tumor protein D52 |
| | | | | AA459318 | |
| 185-187 | CXCR4 | 79629 | | X71635; | CXC chemokine receptor 4 = |
| | | | | T62636; | fusin = neuropeptide Y receptor = L3 |
| | | | | T62491 | |
| 188-189 | JUND | 767784 | | AA418670; | Jun D proto-oncogene |
| | | | | AA418676 | |
| 190-192 | BRF2 | 485770 | | U07802; | Tis 11d = ERF-2 = growth factor early |
| | | | | AA039882; | response gene |
| | | | | AA039967 | |
| 193-195 | A2M | 377647 | | M11313; | Alpha-2-macroglobulin |
| | | | | AA055995; | |
| | | | | AA055907 | |
| 196 | EST | 1384797 | | AA856938 | Homo sapiens mRNA; cDNA DKFZp434O0227 |
| | | | | | (from clone DKFZp434O0227) |
| 197-198 | CD24 | 196519 | | S75311; | CD24 |
| | | | | R91610 | |
| 199-201 | TLR3 | 144675 | | U88879; | TLR3 = Toll-like receptor 3 |
| | | | | R76099; | |
| | | | | R76150 | |
| 202 | ITM2A | 878596 | Hs.17109 | AA775257 | integral membrane protein 2A |
| 203-204 | GATM | 42558 | Hs.75335 | R61229; | glycine amidinotransferase (L- |
| | | | | R61228 | arginine:glycine amidinotransferase) |
| 205-207 | RNASE4 | 81417 | Hs.283749 | D37931; | ribonuclease L (2′,5′-oligoisoadenylate |
| | | | | T60163; | synthetase-dependent) |
| | | | | T60223 | |
| 208-210 | LAMA2 | 471642 | Hs.75279 | Z26653; | laminin alpha 2 (merosin, congenital |
| | | | | AA034939; | muscular dystrophy) |
| | | | | AA034938 | |
| 211 | PBX3 | 448386 | Hs.294101 | AA778198 | pre-B-cell leukemia transcription factor 3 |
| 212 | PLA2G6 | 1472538 | Hs.120360 | AA872271 | phospholipase A2, group VI (cytosolic, |
| | | | | | calcium-independent) |
| 213 | SMARCA2 | 814636 | Hs.198296 | AA481026 | SWI/SNF related, matrix associated, |
| | | | | | actin dependent regulator of chromatin, |
| | | | | | subfamily a, member 2 |
| 214-215 | CUGBP2 | 488956 | Hs.211610 | AA047257; | CUG triplet repeat, RNA-binding |
| | | | | AA057142 | protein 2 |
| 216-218 | TGFBR3 | 209655 | Hs.79059 | L07594; | TGF beta receptor type III |
| | | | | H62473; | |
| | | | | H61499 | |
| 219 | STAR | 859858 | Hs.3132 | AA679454 | steroidogenic acute |
| | | | | | regulatory protein |
| 220 | GNG11 | 1636447 | Hs.83381 | AA999901 | guanine nuclcotide binding protein 11 |
| 221 | CITED2 | 491565 | Hs.82071 | AA115076 | Cbp/p300-interacting transactivator, with |
| | | | | | Glu/Asp-rich carboxy-terminal domain, 2 |
| 222 | CTNNAL1 | 744647 | Hs.58488 | AA621315 | catenin (cadherin-associated protein), |
| | | | | | alpha-like 1 |
| 223 | ABCA8 | 743773 | Hs.38095 | AA634308 | ATP-binding cassette, sub-family A (ABC1), |
| | | | | | member 8 |
| 224-226 | KLF4 | 188232 | Hs.7934 | AF105036; | GKLF = EZF = KLF4 = gut-enriched Kruppel- |
| | | | | H45668; | like zinc finger protein = expressed in |
| | | | | H45711 | vascular endothelial cells |
| 227-228 | ITPR1 | 471725 | Hs.198443 | AA035450; | inositol 1,4,5-triphosphate receptor, |
| | | | | AA035477 | type 1 |
| 229-230 | MAF | 487793 | Hs.30250 | AA043501; | v-maf musculoaponeurotic fibrosarcoma |
| | | | | AA044658 | (avian) oncogene homolog |
| 231-232 | FOXC1 | 768370 | Hs.284186 | AA495790; | forkhead box C1 |
| | | | | AA495846 | |
| 233 | TCF21 | 461351 | Hs.78061 | AA699782 | transcription factor 21 |
| 234-236 | CCNI | 248295 | Hs.79933 | D50310; | Cyclin I |
| | | | | N58511; | |
| | | | | N78101 | |
| 237-238 | DCN | 209367 | Hs.76152 | H64138; | decorin |
| | | | | H64086 | |
| 239-240 | CBF2 | 789049 | Hs.184760 | AA452909; | CCAAT-box-binding transcription factor |
| | | | | AA453077 | |
| 241-242 | EST | 68049 | Hs.180324 | T52830; | Homo sapiens, clone IMAGE: 4183312, |
| | | | | T52829 | mRNA, partial cds |
| 122 | RNASE4 | 81417 | Hs.283749 | | ribonuclease L (2′,5′-oligoisoadenylate |
| | | | | | synthetase-dependent) |
| 243 | SLC4A1AP | 2094012 | Hs.306000 | AI424433 | solute carrier family 4 (anion exchanger), |
| | | | | | member 1, adapter protein |
| 244-245 | GSTM5 | 377731 | Hs.75652 | AA056232; | glutathione S-transferase M5 |
| | | | | AA056231 | |
| 246 | C4BPB | 460470 | Hs.99886 | AA677687 | complement component 4-binding |
| | | | | | protein, beta |
| 247-248 | HS3ST1 | 73609 | Hs.40968 | T55714; | heparan sulfate (glucosamine) 3-O- |
| | | | | T55756 | sulfotransferase 1 |
| 249 | CDKN1C | 2413955 | Hs.106070 | AI828088 | cyclin-dependent kinase inhibitor 1C |
| | | | | | (p57, Kip2) |
| 250 | HNRPDL | 897823 | Hs.170311 | AA598578 | heterogeneous nuclear ribonucleoprotein D-like |
| 251 | CIRBP | 1558799 | Hs.119475 | AA977242 | cold inducible RNA-binding protein |
| 252 | RGS2 | 2321596 | Hs.78944 | A1675670 | regulator of G-protein signalling 2, 24 kD |
| 253-254 | TCEAL1 | 786607 | Hs.95243 | AA478480; | transcription elongation factor A |
| | | | | AA451969 | (SII)-like 1 |
| 255-256 | CAV1 | 377461 | Hs.323469 | AA055835; | caveolin 1, caveolae protein, 22 kD |
| | | | | AA055368 | |
| 257 | ALDH1A1 | 855624 | Hs.76392 | AA664101 | aldehyde dehydrogenase 1 family, member A1 |
| 258-259 | RBPMS | 343443 | Hs.80248 | W67200; | RNA-binding protein gene with multiple |
| | | | | W67323 | splicing |
| 260-261 | ADAMTS1 | 62263 | Hs.8230 | T41173; | a disintegrin-like and metalloprotease |
| | | | | T40309 | (reprolysin type) with thrombospondin |
| | | | | | type 1 motif, 1 |
| 262-263 | DSCR1L1 | 51408 | Hs.156007 | H19440; | Down syndrome critical region gene |
| | | | | H19439 | 1-like 1 |
| 264 | DLK1 | 436121 | Hs.169228 | AA701996 | delta-like homolog (Drosophila) |
| 265-266 | CDH11 | 491113 | Hs.75929 | AA136983; | cadherin 11, type 2, OB-cadherin |
| | | | | AA137109 | (osteoblast) |
| 138 | SGK | 840776 | Hs.296323 | | sgk = putative serine/threonine |
| | | | | | protein kinase transcriptionally |
| | | | | | modified during anisotonic and isotonic |
| | | | | | alterations of cell volume |
| 267 | HFL1 | 450060 | Hs.278568 | AA703392 | H factor (complement)-like 1 |
| 268-269 | FOG2 | 38347 | Hs.106309 | R49439; | Friend of GATA2 |
| | | | | R35921 | |
| 270 | C7 | 898122 | Hs.78065 | AA598478 | complement component 7 |
| 271-272 | SGCE | 784109 | Hs.110708 | AA432066; | sarcoglycan, epsilon |
| | | | | AA446750 | |
| 273 | NBL1 | 898305 | Hs.76307 | AA598830 | neuroblastoma, suppression of tumorigenicity 1 |
| 274-275 | HBB | 173385 | Hs.155376 | H20968; | hemoglobin, beta |
| | | | | H21011 | |
| 276-278 | CARP | 840683 | Hs.31432 | X83703; | Cytokine inducible nuclear protein |
| | | | | AA488072; | |
| | | | | AA486364 | |
| 279-280 | MITF | 278570 | Hs.166017 | N66177; | microphthalmia-associated transcription factor |
| | | | | N99168 | |
| 281-282 | CDC20 | 898062 | Hs.82906 | U05340; | p55CDC |
| | | | | AA598776 | |
| 283-285 | EPS8 | 148028 | Hs.2132 | U12535; | epidermal growth factor receptor kinase |
| | | | | H13623; | substrate (Eps8) |
| | | | | H13622 | |
| 286-287 | ARHI | 345680 | Hs.194695 | W72033; | ras homolog gene family, member I |
| | | | | W76278 | |
| 288 | B4-2 | 857002 | Hs.75969 | AA669637 | proline-rich protein with nuclear targeting |
| | | | | | signal |
| 289-291 | SELE | 186132 | Hs.89546 | M30640; | ELAM1 = endothelial leukocyte adhesion |
| | | | | H39991; | molecule I |
| | | | | H39560 | |
| 292-293 | PMP22 | 133273 | Hs.103724 | R26732; | peripheral myelin protein 22 |
| | | | | R26960 | |
| 294 | EBAF | 340657 | Hs.25195 | W56771 | endometrial bleeding associated factor (left- |
| | | | | | right determination, factor A; transforming |
| | | | | | growth factor beta superfamily) |
| 295-296 | PRKAR2B | 609663 | Hs.77439 | AA180007; | protein kinase, cAMP-dependent, regulatory, |
| | | | | AA181500 | type II, beta |
| 297 | NFKBIE | 1573311 | Hs.91640 | AA953975 | nuclear factor of kappa light polypeptide gene |
| | | | | | enhancer in B-cells inhibitor, epsilon |
| 298-299 | KIT | 269806 | Hs.81665 | N24824; | v-kit Hardy-Zuckerman 4 feline |
| | | | | N36279 | sarcoma viral oncogene homolog |
| 158 | JUNB | 309864 | Hs.198951 | | jun B proto-oncogene |
| 300 | BCKDK | 1573108 | Hs.20644 | AA970731 | branched chain alpha-ketoacid |
| | | | | | dehydrogenase kinase |
| 301-303 | BTG1 | 298268 | Hs.77054 | X61123; | BTG1 = B-cell translocation gene |
| | | | | N70463; | 1 = anti-proliferative |
| | | | | W03824 | |
| 304-305 | AKAP12 | 784772 | Hs.788 | AA478543; | A kinase (PRKA) anchor protein (gravin) 12 |
| | | | | AA478542 | |
| 306-307 | NR4A2 | 898221 | Hs.82120 | S77154; | NOT = Immediate early response |
| | | | | AA598611 | protein = Nurr1 homologue = Nurr77 |
| | | | | | orphan steroid receptor family member |
| 308-309 | HBB | 126531 | Hs.155376 | R06757; | hemoglobin, beta |
| | | | | R06806 | |
| 310-311 | ARHGAP6 | 768489 | Hs.250830 | AA495981; | Rho GTPase activating protein 6 |
| | | | | AA425035 | |
| 312 | PLS3 | 1568391 | Hs.4114 | AA953747 | plastin 3 (T isoform) |
| 313-314 | FNTA | 300015 | Hs.138381 | N78902; | farnesyltransferase, CAAX box, alpha |
| | | | | W06970 | |
| 315-316 | TNFAIP3 | 770670 | Hs.211600 | AA476272; | tumor necrosis factor, alpha-induced |
| | | | | AA433807 | protein 3 |
| 317-318 | EGR1 | 840944 | Hs.326035 | AA486533; | early growth response 1 |
| | | | | AA486628 | |
| 319 | RNAC | 795213 | Hs.113052 | AA453591 | RNA cyclase homolog |
| 320 | PA26 | 813584 | Hs.14125 | AA447661 | p53 regulated PA26 nuclear protein |
| 321 | C11orf13 | 1573778 | Hs.72925 | AA970526 | chromosome 11 open reading frame 13 |
| 322 | ING1L | 2169465 | Hs.107153 | AI564029 | inhibitor of growth family, member 1-like |
| 323 | RPL9 | 2577249 | Hs.157850 | AW075605 | ribosomal protein L9 |
| 324-325 | ADH5 | 813711 | Hs.78989 | AA453776; | alcohol dehydrogenase 5 (class III), chi |
| | | | | AA453859 | polypeptide |
| 326-327 | FZD7 | 298122 | Hs.173859 | N69049; | frizzled (Drosophila) homolog 7 |
| | | | | W00697 | |
| 328-329 | MATN2 | 366100 | Hs.19368 | AA071473; | matrilin 2 |
| | | | | AA082338 | |
| 330-331 | SLC11A3 | 71863 | Hs.5944 | T52564; | solute carrier family 11 (proton-coupled |
| | | | | T57235 | divalent metal ion transporters), member 3 |
| 332-333 | EST | 767641 | Hs.122460 | AA418293; | ESTs |
| | | | | AA418356 | |
| 334-335 | ERCC5 | 292463 | Hs.48576 | N62586; | excision repair cross-complementing rodent |
| | | | | N80359 | repair deficiency, complementation |
| | | | | | group 5 (xeroderma pigmentosum, |
| | | | | | complementation group G (Cockayne |
| | | | | | syndrome)) |
| 336-337 | MGC2479 | 43771 | Hs.79625 | H05655; | hypothetical protein MGC2479 |
| | | | | H05654 | |
| 338-339 | RPL21 | 810617 | Hs.184108 | AA464743; | ribosomal protein L21 |
| | | | | AA464034 | |
| 182 | CD24 | 204335 | Hs.286124 | | CD24 |
| 340-341 | SLPI | 378813 | Hs.251754 | X04470; | Secretory leukocyte protease inhibitor |
| | | | | AA683520 | |
| 342 | SPP1 | 378461 | Hs.313 | AA775616 | Secreted phosphoprotein 1(osteopontin, |
| | | | | | bone sialoprotein I, early T-lymphocyte |
| | | | | | activation 1) |
| 343-344 | BF | 741977 | Hs.69771 | L15702; | B-factor, properdin |
| | | | | AA401441 | |
| 345-347 | CKS1 | 810899 | Hs.334883 | X54941; | CDC28 protein kinase 1 |
| | | | | AA459292; | |
| | | | | AA459522 | |
| 348-349 | MMP7 | 470393 | Hs.2256 | AA031514; | Matrix metalloproteinase 7 (matrilysin) |
| | | | | AA031513 | |
| 350-351 | PAX8 | 742101 | Hs.73149 | AA405767; | Paired box gene 8 |
| | | | | AA405891 | |
| 352-353 | SPINT2 | 814378 | Hs.31439 | AA458849; | Serine protease inhibitor, Kunitz type, 2 |
| | | | | AA459039 | |
| 354 | ZWINT | 451907 | Hs.42650 | AA706968 | ZW10 interactor |
| 355 | DGKH | 2544675 | Hs.159073 | AW052032 | Diacylglycerol kinase, eta |
| 356 | HMGIY | 782811 | Hs.139800 | AA448261 | HMGIY High-mobility group (nonhistone |
| | | | | | chromosomal) protein isoforms I and Y |
| 357-359 | SDC4 | 504763 | Hs.252189 | X67016; | Syndecan 4 (amphiglycan, ryudocan) |
| | | | | AA148737; | |
| | | | | AA148736 | |
| 360 | CDKN2A | 1161155 | Hs.1174 | AA877595 | Cyclin-dependent kinase inhibitor 2A |
| | | | | | (melanoma, p16, inhibits CDK4) |
| 361-362 | SCNN1A | 810873 | Hs.2794 | AA458982; | Sodium channel, nonvoltage-gated 1 |
| | | | | AA459197 | alpha |
| 363 | LDHA | 43550 | Hs.2795 | H05914 | Lactate dehydrogenase A |
| 364-365 | FOLR1 | 131839 | Hs.73769 | R24530; | Folate receptor 1 |
| | | | | R24635 | |
| 366-367 | TPI1 | 855749 | Hs.83848 | M10036; | Triosephosphate isomerase 1 |
| | | | | AA663983 | |
| 368 | KLK8 | 2514426 | Hs.104570 | AI963941 | Kallikrein 8 (neuropsin/ovasin) |
| 200 | CXCR4 | 79629 | Hs.89414 | | Chemokine (C-X-C motif), receptor 4 |
| | | | | | (fusin) |
| 369-370 | KNSL1 | 825606 | Hs.8878 | AA504625; | Kinesin-like 1 |
| | | | | AA504719 | |
| 371-372 | H2AFO | 488964 | Hs.795 | AA047260; | H2A histone family, member O |
| | | | | AA057146 | |
| 373-374 | HLA-DRA | 153411 | Hs.76807 | R47979; | Major histocompatibility complex, class |
| | | | | R48091 | II, DR alpha |
| 375 | CRIP1 | 1323448 | Hs.17409 | AA873604 | Cysteine-rich protein 1 |
| 376 | PP | 950700 | Hs.184011 | AA608572 | pyrophosphatase (inorganic) |
| 377-378 | EST | 666391 | | AA232895; | |
| | | | | AA232894 | |
| 379-381 | SLC2A1 | 207358 | Hs.169902 | K03195; | Solute carrier family 2 (facilitated glucose |
| | | | | H58873; | transporter), member 1 |
| | | | | H58872 | |
| 382 | EST | 897770 | | AA598508 | |
| 383-385 | HDGF | 813673 | Hs.89525 | D16431; | Hepatoma-derived growth factor (high- |
| | | | | AA453749; | mobility group protein 1-like) |
| | | | | AA453831 | |
| 386 | ASS | 882522 | Hs.160786 | AA676466 | Argininosuccinate synthetase |
| 387-388 | CLDN4 | 770388 | Hs.5372 | AA430665; | Claudin 4 |
| | | | | AA427468 | |
| 389 | PRAME | 897956 | Hs.30743 | AA598817 | preferentially expressed antigen in |
| | | | | | melanoma |
| 390-391 | PTPRF | 897788 | Hs.75216 | Y00815; | Protein tyrosine phosphatase, receptor |
| | | | | AA598513 | type, F |
| 392-393 | EYA2 | 741139 | Hs.29279 | AA402754; | Eyes absent (Drosophila) homolog 2 |
| | | | | AA402207 | |
| 394-396 | MYCL1 | 138917 | Hs.92137 | M19720; | v-myc myclocytomatosis viral oncogene |
| | | | | R62813; | homolog 1 |
| | | | | R62862 | |
| 397-399 | STAT1 | 840691 | Hs.21486 | M97935; | Signal transducer and activator of |
| | | | | AA488075; | transcription 1 |
| | | | | AA486367 | |
| 400-401 | MTCH2 | 564492 | Hs.279609 | AA121668; | mitochondrial carrier homolog 2 |
| | | | | AA121740 | |
| 402 | HTR3A | 435597 | Hs.2142 | AA703169 | 5-hydroxytryptamine (serotonin) receptor 3A |
| 403-404 | CCNE1 | 68950 | Hs.9700 | T54121; | Cyclin E1 |
| | | | | T54213 | |
| 405 | CDH6 | 739155 | Hs.32963 | AA421819 | Cadherin 6, type 2, K-cadherin |
| 406-408 | PRKAG1 | 531028 | Hs.3136 | U42412; | Protein kinase, AMP-activated, gamma 1 |
| | | | | AA070495; | non-catalytic subunit |
| | | | | AA070381 | |
| 409 | DEFB1 | 2403485 | Hs.32949 | AI769855 | Defensin, beta 1 |
| 410-411 | ARPC1B | 626502 | Hs.11538 | AA188179; | Actin related protein 2/3 complex, subunit |
| | | | | AA188155 | 1B (41 kD) |
| 412-414 | PRKCI | 71622 | Hs.1904 | L33881; | Protein kinase C, iota |
| | | | | T57875; | |
| | | | | T57957 | |
| 415 | GAPD | 1610448 | Hs.169476 | AA991856 | glyceraldehyde-3-phosphate dehydrogenase |
| 416-417 | C2 | 85497 | Hs.2253 | T71879; | Complement Component C2 |
| | | | | T71878 | |
| 418-419 | H2AFY | 843075 | Hs.75258 | AA488627; | H2A histone family, member Y |
| | | | | AA486003 | |
| 420-421 | TM4SF1 | 840567 | Hs.3337 | AA487893; | Transmembrane 4 superfamily member 1 |
| | | | | AA488005 | |
| 422-423 | GAPD | 50117 | Hs.169476 | H16958; | glyceraldehyde-3-phosphate dehydrogenase |
| | | | | H16957 | |
| 424-426 | IFITM3 | 809910 | Hs.182241 | X57352; | interferon induced transmembrane protein |
| | | | | AA464417; | 3 (1-8U) |
| | | | | AA464416 | |
| 427-428 | GLDC | 248261 | Hs.27 | N58494; | Glycine dehydrogenase (decarboxylating; |
| | | | | N78083 | glycine decarboxylase, glycine cleavage |
| | | | | | system protein P) |
| 429-430 | CALU | 144881 | Hs.7753 | R78586; | Calumenin |
| | | | | R78585 | |
| 431-432 | HBA2 | 208764 | Hs.272572 | H63096; | Hemoglobin, alpha 2 |
| | | | | H63182 | |
| 433 | S100A11 | 810612 | Hs.256290 | AA464731 | S100 calcium-binding protein A11 (calgizzarin) |
| 434-436 | LDHA | 897567 | Hs.2795 | X02152; | Lactate dehydrogenase A |
| | | | | AA497029; | |
| | | | | AA489611 | |
| 437 | UBE2C | 769921 | Hs.93002 | AA430504 | Ubiquitin-conjugating enzyme E2C |
| 438-440 | E2F3 | 304908 | Hs.1189 | D38550; | E2F transcription factor 3 |
| | | | | N92519; | |
| | | | | W38841 | |
| 441-442 | CDH1 | 251019 | Hs.194657 | Z13009; | Cadherin 1, type 1, E-cadherin (epithelial) |
| | | | | H97778 | |
| 443-444 | PSME2 | 210405 | Hs.179774 | H65395; | Proteasome (prosome, macropain) activator |
| | | | | H65394 | subunit 2 (PA28 beta) |
| 445-447 | BMP7 | 344430 | Hs.170195 | X51801; | bone morphogenetic protein 7 (osteogenic |
| | | | | W73473; | protein 1) |
| | | | | W73527 | |
| 448 | TOP2A | 825470 | | AA504348 | topoisomerase (DNA) II alpha (170 kD) |
| 449-451 | IL8 | 328692 | Hs.624 | M17017; | interleukin 8 |
| | | | | W45324; | |
| | | | | W40283 | |
| 452-453 | GRO1 | 324437 | Hs.789 | X54489; | GRO1 oncogene (melanoma growth stimulating |
| | | | | W46900 | activity, alpha) |
| 454-456 | ALDH1A3 | 272686 | Hs.75746 | U07919; | aldehyde dehydrogenase 1 family, member A3; |
| | | | | N32289; | Aldehyde dehydrogenase 6 |
| | | | | N44575 | |
| 457-459 | MMP1 | 624924 | Hs.83169 | X54925; | matrix metalloproteinase 1 (interstitial |
| | | | | AA181875; | collagenase) |
| | | | | AA186634 | |
| 460-461 | OSF-2 | 897910 | Hs.136348 | D13666; | osteoblast specific factor 2 (fasciclin I- |
| | | | | AA598653 | like) |
| 462-464 | CDC25B | 48398 | Hs.153752 | S78187; | cell division cycle 25B; M-phase inducer |
| | | | | H14343; | phosphatase 2 |
| | | | | H14392 | |
| 465-467 | FLNA | 487418 | Hs.195464 | X53416; | filamin A, alpha (actin-binding protein- |
| | | | | AA046721; | 280) |
| | | | | AA046606 | |
| 468-469 | TFP12 | 726086 | Hs.295944 | AA399473; | tissue factor pathway inhibitor 2 |
| | | | | AA293402 | |
| 470-472 | FGF2 | 23073 | Hs.284244 | M27968; | fibroblast growth factor 2 (basic) |
| | | | | R38539; | |
| | | | | T75110 | |
| 473-475 | CD44 | 713145 | Hs.169610 | X56794; | CD44 antigen; extracellular matrix |
| | | | | AA283090; | receptor-III = Hyaluronate |
| | | | | AA282906 | receptor |
| 476-477 | DYT1 | 69046 | Hs.19261 | T54320; | dystonia 1, torsion (autosomal dominant; |
| | | | | T53726 | torsin A) |
| 478 | UCHL1 | 878833 | Hs.76118 | AA670438 | ubiquitin carboxyl-terminal esterase L1 |
| | | | | | (ubiquitin thiolesterase) |
| 479-480 | PLAU | 1696513 | Hs.77274 | D00244; | plasminogen activator, urokinase |
| | | | | AI088434 | |
| 256 | LDHA | 43550 | Hs.2795 | | lactate dehydrogenase A |
| 481-483 | PTGS2 | 147050 | Hs.196384 | U04636; | cyclooxygenase-2; prostaglandin |
| | | | | R80217; | endoperoxide synthase-2 |
| | | | | R80322 | |
| 484-486 | PRNP | 682013 | Hs.74621 | M13899; | prion protein |
| | | | | AA256322; | |
| | | | | AA256449 | |
| 487-488 | MT1X | 297392 | Hs.278462 | N80129; | metallothionein 1L, metallothionein 1X |
| | | | | W03653 | |
| 489-490 | UGB | 81336 | Hs.2240 | T63761; | uteroglobin |
| | | | | T63800 | |
| 491-493 | PBEF | 594539 | Hs.239138 | U02020; | pre-B-cell colony-enhancing factor |
| | | | | AA169813; | |
| | | | | AA171651 | |
| 494-496 | TXNRD1 | 789376 | Hs.13046 | X91247; | thioredoxin reductase 1; GRIM-12 |
| | | | | AA464849; | |
| | | | | AA453335 | |
| 497-499 | NT5 | 21655 | Hs.153952 | X55740; | 5′ nucleotidase (CD73) |
| | | | | T65120; | |
| | | | | T65189 | |
| 500-502 | MT2A | 590150 | Hs.118786 | J00271; | metallothionein 2A |
| | | | | AA156031; | |
| | | | | AA156201 | |
| 503 | ZNF220 | 949928 | Hs.82210 | AA599173 | zinc finger protein 220 |
| 504-506 | AKT1 | 810331 | Hs.71816 | U97276; | BPGF-1 = bone-derived growth factor; v-akt |
| | | | | AA464152; | murine thymoma viral oncogene homolog 1 |
| | | | | AA464217 | |
| 507-509 | PTEN | 322160 | Hs.10712 | U92436; | MMAC1 = PTEN = Tum or suppressor gene at |
| | | | | W37864; | 10q23.3 that is Mutated in Multiple |
| | | | | W37855 | Advanced Cancers = Phosphatase |
| | | | | | and tensin homolog |
| 510-512 | UBL1 | 758495 | Hs.81424 | U83117; | ubiquitin-homology domain protein PIC1 |
| | | | | AA401634; | |
| | | | | AA401864 | |
| 513-514 | WNT2 | 302286 | Hs.89791 | N78828; | wingless-type MMTV integration site family |
| | | | | W17194 | member 2 |
| 515-517 | SFRP4 | 841282 | Hs.105700 | AF026692; | frizzled related protein frpHE |
| | | | | AA487193; | |
| | | | | AA486838 | |
| 518-520 | RUNX1 | 263251 | Hs.129914 | D43968; | AML1 Proto-oncogene |
| | | | | H99599; | |
| | | | | H99598 | |
| 521-523 | TAL1 | 71727 | Hs.73828 | X51990; | T-cell acute lymphocytic leukemia 1 |
| | | | | T51236; | |
| | | | | T51350 | |
| 524-526 | WAS | 236282 | Hs.2157 | U12707; | Wiskott-Aldrich syndrome protein |
| | | | | H61193; | |
| | | | | H62098 | |
| 527-528 | PCTK1 | 713382 | Hs.171834 | X66363; | PCTAIRE 1 serine/threonine protein kinase |
| | | | | AA283125 | |
| 529 | EBP | 295986 | Hs.75105 | N67038 | emopamil-binding protein (sterol isomerase) |
| 530 | SMC1L1 | 897997 | Hs.211602 | AA598887 | SMC1 (structural maintenance of chromosomes 1, |
| | | | | | yeast)-like 1 |
| 531-532 | ARAF1 | 207618 | Hs.77183 | H59758; | v-raf murine sarcoma 3611 viral oncogene |
| | | | | H59757 | homolog 1 |
| 533 | UBE1 | 898262 | Hs.2055 | AA598670 | ubiquitin-activating enzyme E1 |
| 534-535 | LOC51760 | 52226 | Hs.26971 | H23265; | B/K protein |
| | | | | H23376 | |
| 536-537 | LRPAP1 | 842785 | Hs.75140 | AA486209; | low density lipoprotein-related |
| | | | | AA486313 | protein-associated protein 1 (alpha-2- |
| | | | | | macroglobulin receptor-associated |
| | | | | | protein 1) |
| 538-540 | PSTPIP1 | 71434 | Hs.129758 | L07633; | interferon-gamma IEF SSP 5111; Interferon |
| | | | | T47815; | gamma upregulated protein |
| | | | | T47814 | |
| 541-542 | IDH2 | 869375 | Hs.5337 | X69433; | isocitrate dehydrogenase 2 (NADP+), |
| | | | | AA679907 | mitochondrial |
| 543 | SIAHBP1 | 854696 | Hs.74562 | AA630094 | fuse-binding protein-interacting repressor |
| 544 | SLC25A11 | 878413 | Hs.184877 | AA670357 | solute carrier family 25 (mitochondrial |
| | | | | | carrier; oxoglutarate carrier), member 11 |
| 545-547 | LCN2 | 302127 | Hs.204238 | X99133; | lipocalin 2 (oncogene 24p3) |
| | | | | N79823; | |
| | | | | W38398 | |
| 548-550 | TCEB2 | 52162 | Hs.172772 | L42856; | Elongin B = RNA polymerase II |
| | | | | H22966; | transcription factor SIII p18 subunit |
| | | | | H24146 | |
| 551-553 | NM23H1 | 176482 | | X17620; | nm23-H1 = NDP kinase A = Nucleoside |
| | | | | H42520; | dephophate kinase A |
| | | | | H43520 | |
| 554-556 | SCYB5 | 198699 | Hs.89714 | X78686; | ENA78 = chemokine |
| | | | | R95077; | |
| | | | | R95145 | |
| 557-558 | PAK2 | 231951 | Hs.284275 | U25975; | hPAK65 = SER/THR-protein kinase PAK- |
| | | | | H92785 | gamma = P21-activated kinase 3 |
| 559-561 | S100A4 | 472180 | Hs.81256 | M80563; | S100 calcium binding protein A4 = Placental |
| | | | | AA057375; | calcium binding protein = Calvasculin = |
| | | | | AA036758 | mts1 PROTEIN = CAPL |
| 562-564 | CD83 | 564503 | Hs.79197 | Z11697; | CD83 = B-G antigen IgV domain |
| | | | | AA101749; | homolog = B-cell activation |
| | | | | AA101748 | protein = HB15 |
| 565-567 | NCOA1 | 609445 | Hs.74002 | U59302; | SRC-1 = steroid receptor coactivator |
| | | | | AA180462; | |
| | | | | AA179970 | |
| 568-570 | RYBP | 649654 | Hs.7910 | AF179286; | Death effector domain-associated |
| | | | | AA216739; | factor = Binds to Caspase 10 DED |
| | | | | AA216519 | domain = Homolog of mouse RYBP |
| | | | | | repressor protein that interacts with |
| | | | | | Polycomb complex and YY1 = YAF2 |
| | | | | | homolog = DEDAF = YAF2 |
| | | | | | homolog = MLNewGene3 |
| 571-573 | ITGAE | 665279 | Hs.851 | L25851; | CD103 alpha = Integrin alpha-E |
| | | | | AA195282; | |
| | | | | AA195146 | |
| 574-576 | IL7 | 701422 | Hs.72927 | J04156; | IL-7 |
| | | | | AA287945; | |
| | | | | AA288010 | |
| 577-579 | CD36 | 243816 | Hs.75613 | M98399; | CD36 |
| | | | | N39161; | |
| | | | | N45238 | |
| 580-582 | PDGFRB | 773439 | Hs.76144 | J03278; | Platelet-derived growth factor receptor, |
| | | | | AA426020; | beta polypeptide = fused to TEL in |
| | | | | AA428115 | t(5; 12)(q33; p13) chronic myelomonocytic |
| | | | | | leukemia |
| 583-584 | IL17R | 842122 | Hs.129751 | U58917; | IL-17 receptor |
| | | | | AA634809 | |
| 585-586 | HGF | 1219612 | Hs.809 | X16323; | Hepatocyte growth factor (hepapoietin A; |
| | | | | AA687773 | scatter factor) |
| 587-588 | BAD | 1286754 | Hs.76366 | U66879; | BAD = bbc6 = proapopto tic Bcl-2 homolog |
| | | | | AA740876 | |
| 589-591 | ZNF173 | 755176 | Hs.1287 | U09825; | acid finger protein |
| | | | | AA421953; | |
| | | | | AA421952 | |
| 592-593 | ZFP161 | 285742 | Hs.156000 | D89859; | ZF5 = POZ domain zinc finger protein |
| | | | | N64141 | |
| 594-596 | RGS16 | 470132 | Hs.183601 | U70426; | A28-RGS14p = G protein signaling |
| | | | | AA029960; | regulator |
| | | | | AA029959 | |
| 597-599 | PPP1CB | 485729 | Hs.21537 | X80910; | PPP1CB = Protein phosphatase 1, |
| | | | | AA040285; | catalytic subunit, beta isoform |
| | | | | AA040284 | |
| 600-602 | GART | 502761 | Hs.82285 | X54199; | Phosphoribosylglycinamide formyltransferase |
| | | | | AA126256; | ,phospho-ribosylglycinamide synthetase, |
| | | | | AA126360 | phosphoribosylaminoi midazole synthetase |
| 603-605 | ENPP1 | 786041 | Hs.11951 | D12485; | PC-1 = alkaline nucleotide |
| | | | | AA448639; | pyrophosphatase |
| | | | | AA448731 | |
| 606-608 | MMP13 | 786029 | Hs.2936 | X75308; | MMP-13 = Matrix metalloproteinase |
| | | | | AA448634; | 13 = CL-3 = Collagenase 3 |
| | | | | AA448726 | |
| 609-611 | ILK | 292313 | Hs.6196 | U40282; | ILK = integrin-linked kinase |
| | | | | N62542; | |
| | | | | N79210 | |
| 612-614 | SCYA4 | 205633 | Hs.75703 | J04130; | MIP-1 beta = SCAY2 = |
| | | | | H62864; | G-26 = HC21 = pAT 744 = LAG-1 = |
| | | | | H62985 | Act-2 = H400 = SIS-gamma = chemokine |
| 615-617 | KDR | 469345 | Hs.12337 | AF035121; | Kinase insert domain receptor (a type III |
| | | | | AA027012; | receptor tyrosine kinase) |
| | | | | AA026831 | |
| 618-620 | IL18R1 | 755054 | Hs.159301 | U43672; | IL-18 receptor 1 = IL-1Rrp |
| | | | | AI821652; | |
| | | | | AI734039 | |
| 621-623 | PPP2R5A | 41356 | Hs.155079 | L42373; | phosphatase 2A B56-alpha (PP2A) |
| | | | | R59165; | |
| | | | | R59164 | |
| 624-625 | PTK2B | 180298 | Hs.20313 | U43522; | protein tyrosine kinase PYK2 |
| | | | | R85257 | |
| 626-628 | MAP2K3 | 45641 | Hs.180533 | D87116; | Dual specificity mitogen-activated |
| | | | | H08749; | protein kinase kinase 3 |
| | | | | H08467 | |
| 629-631 | TNFR2RP | 124034 | Hs.117847 | L04270; | Lymphotoxin-Beta receptor precursor = |
| | | | | R02558; | Tumor necrosis factor receptor 2 related |
| | | | | R02676 | protein = Tumor necrosis factor C receptor |
| 632-633 | EST | 739852 | Hs.328687 | AI821550; | ESTs, Moderately similar to ALU4_HUMAN ALU |
| | | | | AA477842 | subfamily SB2 sequence contamination warning |
| | | | | | entry [H. sapiens] |
| 634-635 | EST | 1862171 | Hs.310541 | AI053777; | ESTs |
| | | | | AI792563 | |
| 636 | EST | 1985026 | | AI251605 | Unknown |
| 637 | EST | 2002071 | Hs.203960 | AI249848 | ESTs |
| 638 | EST | 2047317 | | AI311297 | Unknown |
| 639 | EST | 2215752 | | AI567814 | Unknown |
| 640 | EST | 2217459 | | AI744181 | Unknown |
| 641 | EST | 2217834 | Hs.328451 | AI744330 | EST, Weakly similar to PRPP_HUMAN |
| | | | | | salivary proline-rich protein II-1 |
| | | | | | [H. sapiens] |
| 642 | EST | 2219300 | | AI745684 | Unknown |
| 643 | EST | 2220085 | Hs.337231 | AI798317 | EST |
| 644 | EST | 2220214 | | AI798385 | Unknown |
| 645 | EST | 2261174 | Hs.185554 | AI609326 | EST |
| 646 | EST | 2261169 | | AI609331 | Unknown |
| 647 | EST | 2292810 | Hs.224732 | AI871658 | EST |
| 648 | EST | 2292831 | Hs.337311 | AI871678 | EST |
| 649 | EST | 2549950 | | AI954130 | Unknown |
| 650 | EST | 2550130 | | AI953438 | Unknown |
| 651-652 | FDFT1 | 25725 | Hs.48876 | R36960; | farnesyl-diphosphate farnesyltransferase 1 |
| | | | | R11842 | |
| 653-654 | NAGA | 28985 | Hs.75372 | R40255; | N-acetylgalactosaminidase, alpha- |
| | | | | R14305 | |
| 655-656 | SECRET | 29054 | Hs.116428 | R40850; | secretagogin |
| | | | | R14422 | |
| 657-658 | SLC9A1 | 30272 | Hs.170222 | R42414; | solute carrier family 9 (sodium/hydrogen |
| | | | | R14692 | exchanger), isoform 1 (antiporter, Na+/H+, |
| | | | | | amiloride sensitive) |
| 659 | TUFM | 34945 | Hs.12084 | R45183 | Tu translation elongation factor, |
| | | | | | mitochondrial |
| 660-661 | MNAT1 | 38471 | Hs.82380 | R49475; | menage a trois 1 (CAK assembly factor) |
| | | | | R35961 | |
| 662-663 | HARS | 43021 | Hs.77798 | R60150; | histidyl-tRNA synthetase |
| | | | | R60149 | |
| 664-665 | EIF4A1 | 46171 | Hs.129673 | H09590; | eukaryotic translation initiation factor 4A, |
| | | | | H09589 | isoform 1 |
| 666-667 | MPI | 50359 | Hs.75694 | HI7096; | mannose phosphate isomerase |
| | | | | H17714 | |
| 668-669 | TAGLN2 | 45544 | Hs.75725 | H08564; | transgelin 2 |
| | | | | H08563 | |
| 670-671 | PON1 | 128143 | Hs.1898 | R12373; | paraoxonase 1 |
| | | | | R09781 | |
| 672-673 | EST | 813444 | Hs.178379 | AA455945; | ESTs |
| | | | | AA455554 | |
| 674-675 | GNB2 | 292213 | Hs.91299 | N68166; | guanine nucleotide binding protein |
| | | | | N80625 | (G protein), beta polypeptide 2 |
| 676-677 | KIAA0365 | 811029 | Hs.190452 | AA485383; | KIAA0365 gene product |
| | | | | AA485539 | |
| 678 | NCSTN | 199645 | Hs.4788 | R96527 | nicastrin |
| 679-681 | ARHGEF6 | 687990 | Hs.79307 | D25304; | KIAA0006 |
| | | | | AA236957; | |
| | | | | AA236617 | |
| 682 | SFRS11 | 204755 | Hs.11482 | H56944 | splicing factor, arginine/serine-rich 11 |
| 683-684 | CUGBP1 | 25588 | Hs.81248 | R15111; | CUG triplet repeat, RNA-binding protein 1 |
| | | | | R12181 | |
| 685-686 | GABRP | 563598 | Hs.70725 | AA101225; | gamma-aminobutyric acid (GABA) A |
| | | | | AA102670 | receptor, pi |
| 687-688 | BMP6 | 768168 | Hs.285671 | AA424833; | bone morphogenetic protein 6 |
| | | | | AA426586 | |
| 689-690 | ATP7A | 687820 | Hs.606 | AA236141; | ATPase, Cu++ transporting, alpha |
| | | | | AA236635 | polypeptide (Menkes syndrome) |
| 691-692 | RBBP4 | 773599 | Hs.16003 | AA428365; | retinoblastoma-binding protein 4 |
| | | | | AA429422 | |
| 693-694 | POLR2A | 740130 | Hs.171880 | AA479052; | polymerase (RNA) II (DNA directed) |
| | | | | AA477535 | polypeptide A (220 kD) |
| 695-696 | SMG1 | 785605 | Hs.110613 | AA449463; | PI-3-kinase-related kinase SMG-1 |
| | | | | AA448998 | |
| 697-698 | GTPBP1 | 826217 | Hs.283677 | U87964; | GP-I = putative G-protein |
| | | | | AA521469 | |
| 699-700 | GS2NA | 767994 | Hs.183105 | AA418821; | nuclear autoantigen |
| | | | | AA418918 | |
| 701-702 | FLJ12442 | 32231 | Hs.84753 | R42815; | hypothetical protein FLJ12442 |
| | | | | R17469 | |
| 703-704 | KIAA0218 | 49404 | Hs.75863 | H15567; | KIAA0218 gene product |
| | | | | H15627 | |
| 705-706 | KIAA0144 | 245015 | Hs.8127 | N52646; | KIAA0144 gene product |
| | | | | N72374 | |
| 707-708 | FOXO1A | 628955 | Hs.170133 | AA194765; | forkhead box O1A (rhabdomyosarcoma) |
| | | | | AA194764 | |
| 709 | CSRP2 | 75254 | Hs.10526 | T59334 | cysteine and glycine-rich protein 2 |
| 710-711 | BRE | 739993 | Hs.80426 | AA479741; | brain and reproductive organ-expressed |
| | | | | AA477082 | (TNFRSF1A modulator) |
| 712-713 | RALY | 825583 | Hs.74111 | AA504617; | RNA-binding protein (autoantigenic) |
| | | | | AA504712 | |
| 714-716 | FGFR2 | 809464 | Hs.282823 | M87771; | FGFR2 = Fibroblast growth factor |
| | | | | AA443093; | receptor 2 |
| | | | | AA456160 | |
| 717-718 | EST | 242820 | Hs.290870 | H94050; | ESTs, Weakly similar to I38588 reverse |
| | | | | H94131 | transcriptase homolog [H. sapiens] |
| 719-720 | PEF | 137353 | Hs.241531 | R38031; | PEF protein with a long N-terminal |
| | | | | R38117 | hydrophobic domain (peflin) |
| 721-722 | EST | 265494 | Hs.153445 | N21309; | Human mRNA for unknown product, |
| | | | | N31244 | partial cds |
| 723-724 | SAST | 739625 | Hs.227489 | AA479623; | syntrophin associated serine/threonine kinase |
| | | | | AA477008 | |
| 725-726 | EST | 142499 | | R70037; | Unknown |
| | | | | R70084 | |
| 727-728 | PLXNA2 | 303035 | Hs.300622 | N91580; | plexin A2 |
| | | | | W19130 | |
| 729-730 | EST | 240694 | Hs.167787 | H78135; | ESTs |
| | | | | H78134 | |
| 731-732 | APMCF1 | 198904 | Hs.12152 | R95693; | APMCF1 protein |
| | | | | R95692 | |
| 375 | CALU | 144881 | Hs.7753 | | calumenin |
| 733-734 | PPY2 | 210873 | Hs.20588 | H67736; | pancreatic polypeptide 2 |
| | | | | H66312 | |
| 735-736 | CRB1 | 248485 | Hs.169745 | N59646; | crumbs (Drosophila) homolog 1 |
| | | | | N78199 | |
| 737-738 | FLJ21661 | 80095 | Hs.334718 | T63321; | hypothetical protein FLJ21661 |
| | | | | T63940 | |
| 739-740 | RAB3A | 163579 | Hs.27744 | H14231; | RAB3A, member RAS oncogene family |
| | | | | H14230 | |
| 741-742 | GCAT | 307094 | Hs.54609 | N93695; | glycine C-acetyltransferase (2-amino-3- |
| | | | | W21033 | ketobutyrate coenzyme A ligase) |
| 743-744 | P14L | 809437 | Hs.178576 | AA458464; | similar to Bos taurus P14 protein |
| | | | | AA442976 | |
| 745-746 | KIAA0008 | 357373 | Hs.77695 | W93717; | KIAA0008 gene product |
| | | | | W93568 | |
| 747-748 | LOX | 341680 | Hs.102267 | W60414; | lysyl oxidase |
| | | | | W60413 | |
| 749-750 | PISD | 343609 | Hs.8128 | W69460; | phosphatidylserine decarboxylase |
| | | | | W69544 | |
| 751-752 | EST | 341834 | Hs.27278 | W60647; | ESTs, Weakly similar to A Chain A, |
| | | | | W60905 | Cyclophilin A [H. sapiens] |
| 753-754 | EST | 809490 | Hs.3737 | AA443117; | ESTs |
| | | | | AA456181 | |
| 755-756 | TMEPAI | 809824 | Hs.83883 | AA455519; | transmembrane, prostate androgen |
| | | | | AA464401 | induced RNA |
| 757-758 | ZNF211 | 346947 | Hs.15110 | W79396; | zinc finger protein 211 |
| | | | | W79316 | |
| 759 | LOC51605 | 810343 | Hs.128791 | AA464166 | CGI-09 protein |
| 760-761 | MAPRE1 | 428223 | Hs.234279 | AA001749; | microtubule-associated protein, |
| | | | | AA001819 | RP/EB family, member 1 |
| 762 | FLJ10701 | 430068 | Hs.146589 | AA009830 | hypothetical protein FLJ10701 |
| 763-764 | DKFZP564C186 | 366353 | Hs.134200 | AA026278; | DKFZP564C186 protein |
| | | | | AA026277 | |
| 765 | EST | 810205 | Hs.264606 | AA464518 | ESTs |
| 766-767 | F23149_1 | 428507 | Hs.152894 | AA004525; | hypothetical protein F23149_1 |
| | | | | AA004607 | |
| 768-769 | FLJ21940 | 810795 | Hs.104916 | AA458876; | hypothetical protein FLJ21940 |
| | | | | AA459066 | |
| 770-771 | FLJ22059 | 292223 | Hs.13323 | N62464; | hypothetical protein FLJ22059 |
| | | | | N79183 | |
| 772-773 | EST | 241861 | Hs.269020 | H93115; | ESTs |
| | | | | H93243 | |
| 398 | RGS1 | 361323 | Hs.75256 | | regulator of G-protein signalling 1 |
| 774 | PDE6A | 361840 | Hs.182240 | W92514 | phosphodiesterase 6A, cGMP-specific, rod, |
| | | | | | alpha |
| 775-776 | IL1B | 491763 | Hs.126256 | AA150507; | interleukin 1, beta |
| | | | | AA156711 | |
| 777 | SF3B4 | 432564 | Hs.25797 | AA699361 | splicing factor 3b, subunit 4, 49 kD |
| 778 | EST | 277627 | Hs.348427 | N45979 | Human SH3 domain-containing protein |
| | | | | | SH3P18 mRNA, complete cds |
| 779 | TCF4 | 854581 | Hs.326198 | AA669136 | transcription factor 4 |
| 780-781 | RAB2L | 741891 | Hs.170160 | AA401972; | RAB2, member RAS oncogene family-like |
| | | | | AA402117 | |
| 782-783 | GOLGA1 | 34102 | Hs.172647 | R44140; | golgi autoantigen, golgin subfamily a, 1 |
| | | | | R23687 | |
| 784 | TNRC12 | 770000 | Hs.306094 | AA427519 | trinucleotide repeat containing 12 |
| 785 | CSNK1E | 854138 | Hs.79658 | AA669272 | casein kinase 1, epsilon |
| 786-787 | AFP | 74537 | Hs.155421 | T59043; | alpha-fetoprotein |
| | | | | T59118 | |
| 788-789 | COVA1 | 588822 | Hs.155185 | AA156560; | cytosolic ovarian carcinoma antigen 1 |
| | | | | AA157732 | |
| 790-791 | APEX | 740907 | Hs.73722 | AA478273; | APEX nuclease (multifunctional DNA |
| | | | | AA478331 | repair enzyme) |
| 792-793 | RBBP2 | 841655 | Hs.76272 | AA487492; | retinoblastoma-binding protein 2 |
| | | | | AA487706 | |
| 794-796 | GRO1 | 323238 | | M36820; | Human cytokine (GRO-beta) mRNA; |
| | | | | W42723; | GRO2 = GRO beta = MIP2 alpha = |
| | | | | W42812 | macrophage inflammatory protein- |
| | | | | | 2 alpha = chemokine |
| 797-799 | WNT2 | 149373 | | X07876; | wingless-type MMTV integration site family |
| | | | | H04382; | member 2 |
| | | | | H04408 | |
| 800 | PTGS2 | 845477 | Hs.196384 | AA644211 | cyclooxygenase-2; prostaglandin |
| | | | | | endoperoxide synthase-2 |
| 801-802 | PRNP | 470074 | Hs.74621 | AA029059; | prion protein |
| | | | | AA029163 | |
| 803-804 | WNT5B | 323636 | Hs.306051 | W44518; | Homo sapiens mRNA for WNT5B, complete |
| | | | | W44517 | cds |
| 805 | CD72 | 1241854 | | AA714696 | |
| 806 | | 897774 | | AA598510 | adenine phosphoribosyltransferase |
| 807-808 | | 795893 | | AA460168 | protein phosphatase 1, regulatory (inhibitor) |
| | | | | AA460768 | subunit 15A |
| 809-810 | | 825214 | | AA504113 | M-phase phosphoprotein 10 |
| | | | | AA504371 | |
| 811-812 | | 154720 | | R55220 | ARD1 homolog, N-acetyltransferase (S. cerevisiae) |
| | | | | R55219 | |
| 813-814 | | 204214 | | H59204 | CDC6 cell division cycle 6 homolog (S. cerevisiae) |
| | | | | H59203 | |
| 815-816 | | 815294 | | AA481547 | protein tyrosine phosphatase, receptor |
| | | | | AA481613 | type, C-associated protein |
| 817 | | 825265 | | AA504204 | polymerase (DNA directed), delta 3 |
| 818 | | 2549467 | | AI952542 | unknown EST |
| 819 | | 1056107 | | AA628360 | putative cyclin G1 interacting protein |
| 820-821 | | 809515 | | AA454565 | pLK = homologue of Drosophila polo |
| | | | | AA456458 | serine/threonine kinase |
| 822 | CMKBR6 | | | U45984 | CCR6 = STRL22 = chemokine receptor for |
| | | | | | MIP-3 alpha/LARC/Exodus on activated B cells |

[0358] TABLE 4
Markers that were Under-expressed in Ovarian Cancer in a Comparison
of Ovarian Epithelial Cancer to Normal Postmenopausal Ovarian Tissue

| | | | | Average | Average | Cancer |
|---|---|---|---|---|---|---|
| SEQ. ID. | IMAGE | Nucleic | | log | log | to |
| NO. | ID | Acid | Description | normal | cancer | normal |
| 202 | 878596 | ITM2A | integral membrane protein 2A | 1.145 | −2.036 | 0.110 |
| 203-204 | 42558 | GATM | glycine amidinotransferase | 4.137 | 0.945 | 0.109 |
| | | | (L-arginine:glycine | | | |
| | | | amidinotransferase) | | | |
| 205-207 | 81417 | RNASE4 | ribonuclease L (2′,5′- | 2.057 | −0.744 | 0.144 |
| | | | oligoisoadenylate synthetase- | | | |
| | | | dependent) | | | |
| 208-210 | 471642 | LAMA2 | laminin alpha 2 (merosin, | 2.806 | 0.361 | 0.184 |
| | | | congenital muscular dystrophy) | | | |
| 211 | 448386 | PBX3 | pre-B-cell leukemia | 2.354 | −0.243 | 0.165 |
| | | | transcription factor 3 | | | |
| 212 | 1472538 | PLA2G6 | phospholipase A2, group VI | 2.604 | 0.099 | 0.176 |
| | | | cytosolic, calcium-independent) | | | |
| 213 | 814636 | SMARCA2 | SWI/SNF related, matrix | 3.055 | 0.231 | 0.141 |
| | | | associated, actin dependent | | | |
| | | | regulator of chromatin, | | | |
| | | | subfamily a, member 2 | | | |
| 214-215 | 488956 | CUGBP2 | CUG triplet repeat, RNA- | 2.960 | −0.043 | 0.125 |
| | | | binding protein 2 | | | |
| 216-218 | 209655 | TGFBR3 | TGF beta receptor type III | 1.956 | 0.057 | 0.268 |
| 219 | 859858 | STAR | steroidogenic acute regulatory | 1.685 | 0.026 | 0.317 |
| | | | protein | | | |
| 220 | 1636447 | GNG11 | guanine nucleotide binding | 1.683 | −0.953 | 0.161 |
| | | | protein 11 | | | |
| 221 | 491565 | CITED2 | Cbp/p300-interacting | 1.576 | −0.497 | 0.238 |
| | | | transactivator, with Glu/Asp- | | | |
| | | | rich carboxy-terminal domain, 2 | | | |
| 222 | 744647 | CTNNAL1 | catenin (cadherin-associated | 1.498 | −0.761 | 0.209 |
| | | | protein), alpha-like 1 | | | |
| 223 | 743773 | ABCA8 | ATP-binding cassette, sub- | 2.317 | 0.060 | 0.209 |
| | | | family A (ABC1), member 8 | | | |
| 224-226 | 188232 | KLF4 | GKLF = EZF = KLF4 = gut- | 1.644 | −0.741 | 0.191 |
| | | | enriched Kruppel-like zinc | | | |
| | | | finger protein = expressed in | | | |
| | | | vascular endothelial cells | | | |
| 227-228 | 471725 | ITPR1 | inositol 1,4,5-triphosphate | 1.600 | −0.616 | 0.215 |
| | | | receptor, type 1 | | | |
| 229-230 | 487793 | MAF | v-maf musculoaponeurotic | 0.765 | −2.032 | 0.144 |
| | | | fibrosarcoma (avian) oncogene | | | |
| | | | homolog | | | |
| 231-232 | 768370 | FOXC1 | forkhead box C1 | 2.270 | −0.021 | 0.204 |
| 233 | 461351 | TCF21 | transcription factor 21 | 1.733 | 0.193 | 0.344 |
| 234-236 | 248295 | CCNI | Cyclin I | 2.460 | −0.030 | 0.178 |
| 237-238 | 209367 | DCN | decorin | 3.762 | 0.582 | 0.110 |
| 239-240 | 789049 | CBF2 | CCAAT-box-binding | 2.140 | 0.019 | 0.230 |
| | | | transcription factor | | | |
| 241-242 | 68049 | | Homo sapiens, clone | 2.074 | 0.243 | 0.281 |
| | | | IMAGE: 4183312, mRNA, | | | |
| | | | partial cds | | | |
| 122 | 81417 | RNASE4 | ribonuclease L (2′,5′- | 1.696 | −0.117 | 0.285 |
| | | | oligoisoadenylate synthetase- | | | |
| | | | dependent) | | | |
| 243 | 2094012 | SLC4A1AP | solute carrier family 4 (anion | 1.869 | 0.195 | 0.313 |
| | | | exchanger), member 1, adapter | | | |
| | | | protein | | | |
| 244-245 | 377731 | GSTM5 | glutathione S-transferase M5 | 1.558 | 0.242 | 0.402 |
| 246 | 460470 | C4BPB | complement component 4- | 0.750 | −0.851 | 0.330 |
| | | | binding protein, beta | | | |
| 247-248 | 73609 | HS3ST1 | heparan sulfate (glucosamine) | 2.017 | 0.328 | 0.310 |
| | | | 3-O-sulfotransferase 1 | | | |
| 249 | 2413955 | CDKN1C | cyclin-dependent kinase | 2.739 | 0.465 | 0.207 |
| | | | inhibitor 1C (p57, Kip2) | | | |
| 250 | 897823 | HNRPDL | heterogeneous nuclear | 1.703 | −0.229 | 0.262 |
| | | | ribonucleoprotein D-like | | | |
| 251 | 1558799 | C1RBP | cold inducible RNA-binding | 1.817 | −0.183 | 0.250 |
| | | | protein | | | |
| 252 | 2321596 | RGS2 | regulator of G-protein signalling | 1.607 | −0.290 | 0.269 |
| | | | 2, 24 kD | | | |
| 253-254 | 786607 | TCEAL1 | transcription elongation factor A | 1.737 | 0.083 | 0.318 |
| | | | (SII)-like 1 | | | |
| 255-256 | 377461 | CAV1 | caveolin 1, caveolae protein, | 0.146 | −2.506 | 0.159 |
| | | | 22 kD | | | |
| 257 | 855624 | ALDH1A1 | aldehyde dehydrogenase 1 | 2.030 | −0.068 | 0.233 |
| | | | family, member A1 | | | |
| 258-259 | 343443 | RBPMS | RNA-binding protein gene with | 1.727 | −0.240 | 0.256 |
| | | | multiple splicing | | | |
| 260-261 | 62263 | ADAMTS1 | a disintegrin-like and | 1.589 | 0.029 | 0.339 |
| | | | metalloprotease (reprolysin | | | |
| | | | type) with thrombospondin type | | | |
| | | | 1 motif, 1 | | | |
| 262-263 | 51408 | DSCR1L1 | Down syndrome critical region | 2.054 | 0.260 | 0.288 |
| | | | gene 1-like 1 | | | |
| 264 | 436121 | DLK1 | delta-like homolog (Drosophila) | 0.307 | −1.944 | 0.210 |
| 265-266 | 491113 | CDH11 | cadherin 11, type 2, OB- | 2.308 | 0.502 | 0.286 |
| | | | cadherin (osteoblast) | | | |
| 139 | 840776 | SGK | sgk = putative serine/threonine | 1.444 | −0.201 | 0.320 |
| | | | protein kinase transcriptionally | | | |
| | | | modified during anisotonic and | | | |
| | | | isotonic alterations of cell volume | | | |
| 267 | 450060 | HFL1 | H factor (complement)-like 1 | 2.490 | 0.664 | 0.282 |
| 268-269 | 38347 | FOG2 | Friend of GATA2 | 1.905 | 0.463 | 0.368 |
| 270 | 898122 | C7 | complement component 7 | 2.643 | 0.660 | 0.253 |
| 271-272 | 784109 | SGCE | sarcoglycan, epsilon | 1.573 | −0.213 | 0.290 |
| 273 | 898305 | NBL1 | neuroblastoma, suppression of | 1.910 | 0.153 | 0.296 |
| | | | tumorigenicity 1 | | | |
| 274-275 | 173385 | HBB | hemoglobin, beta | 0.165 | −2.317 | 0.179 |
| 276-278 | 840683 | CARP | Cytokine inducible nuclear | 1.728 | 0.018 | 0.306 |
| | | | protein | | | |
| 279-280 | 278570 | MITF | microphthalmia-associated | 0.242 | −1.580 | 0.283 |
| | | | transcription factor | | | |
| 281-282 | 898062 | CDC20 | p55CDC | 1.679 | −0.043 | 0.303 |
| 283-285 | 148028 | EPS8 | epidermal growth factor receptor | 1.595 | −0.344 | 0.261 |
| | | | kinase substrate (Eps8) | | | |
| 286-287 | 345680 | ARHI | ras homolog gene family, | 1.595 | 0.212 | 0.383 |
| | | | member 1 | | | |
| 288 | 857002 | B4-2 | proline-rich protein with nuclear | 1.523 | 0.285 | 0.424 |
| | | | targeting signal | | | |
| 289-291 | 186132 | SELE | ELAM1 = endothelial leukocyte | 1.480 | −0.393 | 0.273 |
| | | | adhesion molecule 1 | | | |
| 292-293 | 133273 | PMP22 | peripheral myelin protein 22 | 1.767 | 0.017 | 0.297 |
| 294 | 340657 | EBAF | endometrial bleeding associated | 1.422 | −0.076 | 0.354 |
| | | | factor (left-right determination, | | | |
| | | | factor A; transforming growth | | | |
| | | | factor beta superfamily) | | | |
| 295-296 | 609663 | PRKAR2B | protein kinase, cAMP-dependent, | 1.357 | −0.461 | 0.284 |
| | | | regulatory, type II, beta | | | |
| 297 | 1573311 | NFKB1E | nuclear factor of kappa light | 1.242 | −1.102 | 0.197 |
| | | | polypeptide gene enhancer in B- | | | |
| | | | cells inhibitor, epsilon | | | |
| 298-299 | 269806 | KIT | v-kit Hardy-Zuckerman 4 feline | 2.324 | 0.315 | 0.248 |
| | | | sarcoma viral oncogene homolog | | | |
| 158 | 309864 | JUNB | jun B proto-oncogene | 3.465 | 1.117 | 0.196 |
| 300 | 1573108 | BCKDK | branched chain alpha-ketoacid | 1.306 | −1.057 | 0.194 |
| | | | dehydrogenase kinase | | | |
| 301-303 | 298268 | BTG1 | BTG1 = B-cell translocation gene | 1.409 | −0.239 | 0.319 |
| | | | 1 = anti-proliferative | | | |
| 304-305 | 784772 | AKAP12 | A kinase (PRKA) anchor protein | 1.568 | −0.413 | 0.253 |
| | | | (gravin) 12 | | | |
| 306-307 | 898221 | NR4A2 | NOT = Immediate early response | 2.092 | 0.341 | 0.297 |
| | | | protein = Nurr1 | | | |
| | | | homologue = Nurr77 orphan | | | |
| | | | steroid receptor family member | | | |
| 308-309 | 126531 | HBB | hemoglobin, beta | 0.190 | −2.034 | 0.214 |
| 310-311 | 768489 | ARHGAP6 | Rho GTPase activating protein 6 | 1.263 | −0.109 | 0.386 |
| 312 | 1568391 | PLS3 | plastin 3 (T isoform) | 1.241 | −1.045 | 0.205 |
| 313-314 | 300015 | FNTA | farnesyltransferase, CAAX box, alpha | 1.354 | 0.091 | 0.417 |
| 315-316 | 770670 | TNFAIP3 | tumor necrosis factor, alpha- | 2.088 | 0.445 | 0.320 |
| | | | induced protein 3 | | | |
| 317-318 | 840944 | EGR1 | early growth response 1 | 3.245 | 0.765 | 0.179 |
| 319 | 795213 | RNAC | RNA cyclase homolog | 1.812 | 0.043 | 0.293 |
| 320 | 813584 | PA26 | p53 regulated PA26 nuclear protein | 1.329 | 0.084 | 0.422 |
| 321 | 1573778 | C11orf13 | chromosome 11 open reading | 1.241 | −1.048 | 0.205 |
| | | | frame 13 | | | |
| 322 | 2169465 | ING1L | inhibitor of growth family, | 1.267 | 0.031 | 0.425 |
| | | | member 1-like | | | |
| 323 | 2577249 | RPL9 | ribosomal protein L9 | 1.756 | −0.313 | 0.238 |
| 324-325 | 813711 | ADH5 | alcohol dehydrogenase 5 (class | 1.211 | −0.616 | 0.282 |
| | | | III), chi polypeptide | | | |
| 326-327 | 298122 | FZD7 | frizzled (Drosophila) homolog 7 | 2.554 | 0.747 | 0.286 |
| 328-329 | 366100 | MATN2 | matrilin 2 | 2.205 | 0.536 | 0.315 |
| 330-331 | 71863 | SLC11A3 | solute carrier family 11 (proton- | 2.466 | 0.808 | 0.317 |
| | | | coupled divalent metal ion | | | |
| | | | transporters), member 3 | | | |
| 332-333 | 767641 | | ESTs | 0.965 | −0.153 | 0.461 |
| 334-335 | 292463 | ERCC5 | excision repair cross- | 1.695 | −0.098 | 0.289 |
| | | | complementing rodent repair | | | |
| | | | deficiency, complementation | | | |
| | | | group 5 (xeroderma | | | |
| | | | igmentosum, complementation | | | |
| | | | group G (Cockayne syndrome)) | | | |
| 336-337 | 43771 | MGC2479 | hypothetical protein MGC2479 | 1.374 | −0.243 | 0.326 |
| 338-339 | 810617 | RPL21 | ribosomal protein L21 | 1.374 | −0.370 | 0.298 |
| 449-451 | IL8 | 328692 | interleukin 8 | | −4.52 | |
| 452-453 | GRO1 | 324437 | GRO1 oncogene (melanoma | | −3.79 | |
| | | | growth stimulating activity, | | | |
| | | | alpha) | | | |
| 454-456 | ALDH1A3 | 272686 | aldehyde dehydrogenase 1 | | −3.98 | |
| | | | family, member A3; Aldehyde | | | |
| | | | dehydrogenase 6 | | | |
| 457-459 | MMP1 | 624924 | matrix metalloproteinase 1 | | −3.72 | |
| | | | (interstitial collagenase) | | | |
| 460-461 | OSF-2 | 897910 | osteoblast specific factor 2 | | −3.12 | |
| | | | (fasciclin I-like) | | | |
| 462-464 | CDC25B | 48398 | cell division cycle 25B; M- | | −3.09 | |
| | | | phase inducer phosphatase 2 | | | |
| 465-467 | FLNA | 487418 | filamin A, alpha (actin-binding | | −3.04 | |
| | | | protein-280) | | | |
| 468-469 | TFP12 | 726086 | tissue factor pathway inhibitor 2 | | −2.82 | |
| 470-472 | FGF2 | 23073 | fibroblast growth factor 2 (basic) | | −2.72 | |
| 473-475 | CD44 | 713145 | CD44 antigen; extracellular | | −2.66 | |
| | | | matrix receptor-III = Hyaluronate | | | |
| | | | receptor | | | |
| 476-477 | DYT1 | 69046 | dystonia 1, torsion (autosomal | | −2.57 | |
| | | | dominant; torsin A) | | | |
| 478 | UCHL1 | 878833 | ubiquitin carboxyl-terminal | | −2.53 | |
| | | | esterase L1 (ubiquitin | | | |
| | | | thiolesterase) | | | |
| 479-480 | PLAU | 1696513 | plasminogen activator, urokinase | | −2.49 | |
| 256 | LDHA | 43550 | lactate dehydrogenase A | | −2.48 | |
| 481-483 | PTGS2 | 147050 | cyclooxygenase-2; prostaglandin | | −2.47 | |
| | | | endoperoxide synthase-2 | | | |
| 484-486 | PRNP | 682013 | prion protein | | 2.42; | |
| | | | | | −2.36 | |
| 487-488 | MT1X | 297392 | metallothionein 1L, | | −2.35 | |
| | | | metallothionein 1X | | | |
| 489-490 | UGB | 81336 | uteroglobin | | −2.32 | |
| 491-493 | PBEF | 594539 | pre-B-cell colony-enhancing | | −2.31 | |
| | | | factor | | | |
| 494-496 | TXNRD1 | 789376 | thioredoxin reductase 1; GRIM-12 | | −2.24 | |
| 497-499 | NT5 | 21655 | 5′ nucleotidase (CD73) | | −2.21 | |
| 500-502 | MT2A | 590150 | metallothionein 2A | | −2.21 | |
| 503 | ZNF220 | 949928 | zinc finger protein 220 | | −2.20 | |

[0359] TABLE 5
Markers that were Over-expressed in Ovarian Cancer in a Comparison of
Ovarian Epithelial Cancer to Normal Postmenopausal Ovarian Tissue

| | | | | Average | Average | Cancer |
|---|---|---|---|---|---|---|
| SEQ. ID. | | Nucleic | | log | log | to |
| NO. | IMAGE ID | Acid | Description | normal | cancer | normal |
| 18-19 | 82195 | SERPINF2 | Branched chain keto acid | | 1.45 | |
| | | | dehydrogenase E1, beta | | | |
| | | | polypeptide (maple syrup urine | | | |
| | | | disease) | | | |
| 30-31 | 295939 | FLJ22174 | hypothetical protein FLJ22174 | | 1.38 | |
| 50-51 | 755599 | IFITM1 | Interferon induced | | 1.74 | |
| | | | transmembrane protein 1 (9-27) | | | |
| 55-57 | 624655 | IFITM2 | Interferon-induced protein 1-8D | | 1.53 | |
| 60 | 786675 | HE4 | Epididymis-specific, whey-acidic | | 2.41 | |
| | | | protein type, four-disulfide core; | | | |
| | | | putative ovarian carcinoma marker | | | |
| 68-69 | 782513 | G1P3 | Interferon, alpha-inducible | | 1.64 | |
| | | | protein (clone IFI-6-16) | | | |
| 74-76 | 182288 | DDR1 | Receptor protein-tyrosine kinase | | 1.43 | |
| | | | EDDR1 | | | |
| 85-86 | 811139 | HLA-DRB5 | Major histocompatibility | | 1.91 | |
| | | | complex, class II, DR beta 5 | | | |
| 101-103 | 417711 | HLA-DRB1 | Major histocompatibility | | 1.94 | |
| | | | complex, class II, DR beta 1 | | | |
| 89-91 | 725751 | CD74 | Invariant chain = la-associated | | 2.69 | |
| | | | invariant gamma-chain | | | |
| 92-93 | 840681 | CD74 | Invariant chain = la-associated | | 2.58 | |
| | | | invariant gamma-chain | | | |
| 94-96 | 117411 | HLA-DRA | MHC Class II = DR alpha | | 1.62 | |
| 97-99 | 207715 | HLA-DPA | MHC Class II = DP alpha | | 1.85 | |
| 122-123 | 361323 | RGS1 | regulator of G-protein signaling 1 | | 1.73 | |
| 133-135 | 755279 | FOS | c-fos | | 1.76 | |
| 149-151 | 279388 | SORL1 | Mosaic protein LR11 = hybrid | | 1.56 | |
| | | | receptor gp250 precursor | | | |
| 164-166 | 813256 | ABCB1 | MDR1 = Multidrug resistance | | 1.64 | |
| | | | protein 1 = P-glycoprotein | | | |
| 167-168 | 23804 | ZFP36 | Zinc finger protein homologous | | 1.74 | |
| | | | to Zfp-36 in mouse | | | |
| 169-171 | 135880 | ZFP36 | TTP = tristetraproline = GOS24 = zin | | 2.00 | |
| | | | c finger transcriptional regulator | | | |
| 174-175 | 41650 | HGF | hepatocyte growth factor | | 1.54 | |
| | | | (hepapoietin A; scatter factor) | | | |
| 176-178 | 840776 | SGK | sgk = putative serine/threonine | | 2.02 | |
| | | | protein kinase transcriptionally | | | |
| | | | modified during anisotonic and | | | |
| | | | isotonic alteration | | | |
| 179-180 | 814508 | PPP1R7 | Protein phosphatase 1, regulatory | | 1.78 | |
| | | | subunit 7 | | | |
| 181-182 | 204335 | CD24 | CD24 antigen (small cell lung | | 2.75 | |
| | | | carcinoma cluster 4 antigen) | | | |
| 190-192 | 485770 | BRF2 | Tis 11d = ERF-2 = growth factor | | 1.62 | |
| | | | early response gene | | | |
| 199-201 | 144675 | TLR3 | TLR3 = Toll-like receptor 3 | | 1.98 | |
| 340-341 | 378813 | SLP1 | secretory leukocyte protease | −0.379 | 2.294 | 6.377 |
| | | | inhibitor (antileukoproteinase) | | | |
| 342 | 378461 | SPP1 | secreted phosphoprotein 1 | −2.657 | −0.088 | 5.938 |
| | | | (osteopontin, bone sialoprotein I, | | | |
| | | | early T-lymphocyte activation 1) | | | |
| 343-344 | 741977 | BF | B-factor, properdin | −0.362 | 1.953 | 4.974 |
| 345-347 | 810899 | CKS1 | ckshs 1 = homolog of Cks 1 = | −1.484 | 0.637 | 4.351 |
| | | | p34Cdc28/Cdc2-associated protein | | | |
| 348-349 | 470393 | MMP7 | matrix metalloproteinase 7 | 0.673 | 2.535 | 3.635 |
| | | | (matrilysin, uterine) | | | |
| 350-351 | 742101 | PAX8 | paired box gene 8 | −0.566 | 1.196 | 3.391 |
| 352-353 | 814378 | SPINT2 | serine protease inhibitor, Kunitz | −0.306 | 1.432 | 3.336 |
| | | | type, 2 | | | |
| 354 | 451907 | ZWINT | ZW10 interactor | −2.461 | −0.856 | 3.043 |
| 355 | 2544675 | DGKH | diacylglycerol kinase, eta | −0.036 | 1.498 | 2.896 |
| 356 | 782811 | HMGIY | high-mobility group (nonhistone | −2.272 | −0.760 | 2.851 |
| | | | chromosomal) protein isoforms I and Y | | | |
| 357-359 | 504763 | SDC4 | Syndecan-4 = amphiglycan = | −0.871 | 0.575 | 2.725 |
| | | | ryudocan core protein | | | |
| 360 | 1161155 | CDKN2A | cyclin-dependent kinase inhibitor | −0.839 | 0.593 | 2.699 |
| | | | 2A (melanoma, p16, inhibits CDK4) | | | |
| 361-362 | 810873 | SCNN1A | sodium channel, nonvoltage-gated 1 | 0.127 | 1.534 | 2.652 |
| | | | alpha | | | |
| 363 | 43550 | LDHA | lactate dehydrogenase A | −3.496 | −2.152 | 2.538 |
| 364-365 | 131839 | FOLR1 | folate receptor 1 (adult) | −0.867 | 0.467 | 2.522 |
| 366-367 | 855749 | TPI1 | Triosephosphate isomerase 1 | −2.272 | −1.008 | 2.400 |
| 368 | 2514426 | KLK8 | kallikrein 8 (neuropsin/ovasin) | −0.491 | 0.742 | 2.352 |
| 200 | 79629 | CXCR4 | CXC chemokine receptor 4 = | −0.588 | 0.618 | 2.307 |
| | | | fusin = neuropeptide Y | | | |
| | | | receptor = L3 | | | |
| 369-370 | 825606 | KNSL1 | kinesin-like 1 | −1.797 | −0.602 | 2.290 |
| 371-372 | 488964 | H2AFO | H2A histone family, member O | −1.329 | −0.144 | 2.274 |
| 373-374 | 153411 | HLA-DRA | major histocompatibility | 1.967 | 3.150 | 2.270 |
| | | | complex, class II, DR alpha | | | |
| 375 | 1323448 | CRIP1 | cysteine-rich protein 1 (intestinal) | 0.086 | 1.246 | 2.234 |
| 376 | 950700 | PP | pyrophosphatase (inorganic) | −1.029 | 0.118 | 2.214 |
| 377-378 | 666391 | ESTs | Unknown | 0.214 | 1.360 | 2.212 |
| 379-381 | 207358 | SLC2A1 | glucose transporter (HepG2) | −1.190 | −0.050 | 2.204 |
| 382 | 897770 | ESTs | Unknown | −0.173 | 0.943 | 2.167 |
| 383-385 | 813673 | HDGF | hepatoma-derived growth factor | −0.786 | 0.329 | 2.166 |
| 386 | 882522 | ASS | argininosuccinate synthetase | −0.424 | 0.676 | 2.143 |
| 387-388 | 770388 | CLDN4 | claudin 4 | 0.065 | 1.159 | 2.135 |
| 389 | 897956 | PRAME | preferentially expressed antigen | −2.071 | −0.977 | 2.134 |
| | | | in melanoma | | | |
| 390-391 | 897788 | PTPRF | LAR = LCA-homologue | −0.175 | 0.900 | 2.108 |
| 392-393 | 741139 | EYA2 | eyes absent (Drosophila) homolog 2 | −0.133 | 0.939 | 2.102 |
| 394-396 | 138917 | MYCL1 | L-myc | −0.042 | 1.026 | 2.096 |
| 397-399 | 840691 | STAT1 | STAT1 = IFN alpha/beta- | −0.023 | 1.044 | 2.095 |
| | | | responsive transcription factor | | | |
| | | | 1SGF3 beta subunits (p91/p84) | | | |
| 400-401 | 564492 | MTCH2 | mitochondrial carrier homolog 2 | −1.566 | −0.512 | 2.076 |
| 402 | 435597 | HTR3A | 5-hydroxytryptamine (serotonin) | −0.392 | 0.656 | 2.067 |
| | | | receptor 3A | | | |
| 403-404 | 68950 | CCNE1 | cyclin E1 | −0.470 | 0.577 | 2.066 |
| 405 | 739155 | CDH6 | cadherin 6, type 2, K-cadherin | −0.286 | 0.748 | 2.048 |
| | | | (fetal kidney) | | | |
| 406-408 | 531028 | PRKAG1 | 5′-AMP-activated protein kinase, | 0.148 | 1.181 | 2.046 |
| | | | gamma-1 subunit | | | |
| 409 | 2403485 | DEFB1 | defensin, beta 1 | 0.335 | 1.357 | 2.031 |
| 410-411 | 626502 | ARPC1B | actin related protein 2/3 complex, | −0.808 | 0.213 | 2.030 |
| | | | subunit 1A (41 kD) | | | |
| 412-414 | 71622 | PRKCI | PKC iota = Protein kinase C, iota | −0.202 | 0.802 | 2.006 |
| 415 | 1610448 | GAPD | glyceraldehyde-3-phosphate | −1.484 | −0.480 | 2.005 |
| | | | dehydrogenase | | | |
| 416-417 | 85497 | C2 | complement component 2 | −0.413 | 0.589 | 2.002 |
| 418-419 | 843075 | H2AFY | H2A histone family, member Y | −0.829 | 0.164 | 1.990 |
| 420-421 | 840567 | TM4SF1 | transmembrane 4 superfamily | −1.261 | −0.270 | 1.987 |
| | | | member 1 | | | |
| 422-423 | 50117 | GAPD | glyceraldehyde-3-phosphate | −2.692 | −1.706 | 1.981 |
| | | | dehydrogenase | | | |
| 424-426 | 809910 | IFITM3 | Interferon-inducible protein 1-8U | −0.099 | 0.887 | 1.981 |
| 427-428 | 248261 | GLDC | glycine dehydrogenase | −0.757 | 0.221 | 1.970 |
| | | | (decarboxylating; glycine | | | |
| | | | decarboxylase, glycine cleavage | | | |
| | | | system protein P) | | | |
| 429-430 | 144881 | CALU | calumenin | −1.579 | −0.620 | 1.943 |
| 431-432 | 208764 | HBA2 | hemoglobin, alpha 2 | −0.114 | 0.837 | 1.934 |
| 433 | 810612 | S100A11 | S100 calcium-binding protein | −0.670 | 0.279 | 1.931 |
| | | | A11 (calgizzarin) | | | |
| 434-436 | 897567 | LDHA | Lactate dehydrogenase A | −2.982 | −2.038 | 1.925 |
| 437 | 769921 | UBE2C | ubiquitin-conjugating enzyme | −1.429 | −0.487 | 1.922 |
| | | | E2C | | | |
| 438-440 | 304908 | E2F3 | E2F-3 = pRB-binding transcription | −0.526 | 0.416 | 1.921 |
| | | | factor = KIAA0075 | | | |
| 441-442 | 251019 | CDH1 | E-cadherin | −0.248 | 0.682 | 1.905 |
| 443-444 | 210405 | PSME2 | proteasome (prosome, | −0.715 | 0.213 | 1.902 |
| | | | macropain) activator subunit 2 | | | |
| | | | (PA28 beta) | | | |
| 445-447 | 344430 | BMP7 | OP-1 = osteogenic protein in the | −0.075 | 0.852 | 1.901 |
| | | | TGF-beta family | | | |
| 448 | 825470 | TOP2A | TOP2A | | | 2 |

[0360] TABLE 6
Markers that were Differentially Expressed Between BRCA1-Linked and Sporadic
Tumors in a Comparison to reference Immortalized Ovarian Epithelial Cells.

| | | | Geometric | Geometric | Fold |
|---|---|---|---|---|---|
| | | | mean of | mean of | difference |
| SEQ ID | Nucleic | | ratios in | ratios in | in geometric |
| NO. | Acid | Description | BRCA1 | sporadic | means |
| 805 | CD72 | B-cell differentiation antigen | 1.49 | 1.17 | 0.79 |
| | | CD72 (human); | | | |
| 544 | SLC25A11 | solute carrier family 25 | 1.27 | 1.08 | 0.84 |
| | | (mitochondrial carrier; | | | |
| | | oxoglutarate carrier), member 11 | | | |
| 545-547 | LCN2 | lipocalin 2 (oncogene 24p3) | 1.29 | 0.98 | 0.76 |
| 538-540 | PSTPIP1 | interferon-gamma IEF SSP | 1.95; | 1.31; | 0.67; |
| | | 5111; Interferon gamma | 1.6 | 1.04 | 0.65 |
| | | upregulated protein | | | |
| 543 | S1AHBP1 | fuse-binding protein-interacting | 1.86 | 1.21 | 0.65 |
| | | repressor | | | |
| 533 | UBE1 | ubiquitin-activating enzyme E1 | 1.54 | 0.94 | 0.61 |
| 524-526 | WAS | Wiskott-Aldrich syndrome protein | 1.13 | 0.79 | 0.7 |
| 541-542 | IDH2 | isocitrate dehydrogenase 2 | 1.69 | 1.02 | 0.6 |
| | | (NADP+), mitochondrial | | | |
| 527-528 | PCTK1 | PCTAIRE 1 serine/threonine | 1.33 | 1.12 | 0.84 |
| | | protein kinase | | | |

[0361] TABLE 7
Markers that were Differentially Expressed Between BRCA2-Linked and Sporadic
Tumors in a Comparison to reference Immortalized Ovarian Epithelial Cells.

| | | | Geometric | Geometric | Fold |
|---|---|---|---|---|---|
| | | | mean of | mean of | difference |
| SEQ | | | ratios in | ratios in | in |
| ID | Nucleic | | BRCA1-linked | sporadic | geometric |
| NO. | Acid | Description | tumors | tumors | means |
| 279 | LOC51760 | B/K protein | 1.32 | 1.1 | 0.83 |
| 280 | LRPAP1 | low density lipoprotein- | 1.45 | 1.13 | 0.78 |
| | | related protein-associated | | | |
| | | protein 1 (alpha-2- | | | |
| | | macroglobulin receptor- | | | |
| | | associated protein 1) | | | |

[0362] TABLE 8
Markers that were Differentially Expressed Between Combined
BRCA-Linked Group and Sporadic Tumors in a Comparison to
reference Immortalized Ovarian Epithelial Cells.

| | | | Geometric | Geometric | Fold |
|---|---|---|---|---|---|
| | | | mean of | mean of | difference |
| SEQ | | | ratios in | ratios in | in |
| ID | Nucleic | | BRCA1-linked | sporadic | geometric |
| NO. | Acid | Description | tumors | tumors | means |
| 281 | PSTPIP1 | interferon-gamma IEF SSP | 1.73; | 1.31; | 0.76; |
| | | 5111 = Interferon gamma | 1.41 | 1.04 | 0.74 |
| | | upregulated protein | | | |
| 282 | IDH2 | Isocitrate dehydrogenase 2 | 1.66 | 1.02 | 0.61 |
| | | (NADP+), mitochondrial | | | |
| 274 | PCTK1 | PCTAIRE 1 serine/threonine | 1.29 | 1.12 | 0.86 |
| | | protein kinase | | | |

[0363] TABLE 9
Markers that were Differentially Expressed between BRCA1-like and BRCA2-like
tumors in a Comparison to reference Immortalized Ovarian Epithelial Cells.

| | | | Geometric | Geometric | Fold |
|---|---|---|---|---|---|
| | | | mean of | mean of | Difference |
| SEQ ID | | | ratios in | ratios in | in Geometric |
| NO: | Gene | Description | BRCA1 | BRCA2 | Means |
| 122-123 | RGS1 | regulator of G-protein signalling 1 | 1.79 | 4.75 | 2.65 |
| 122-123 | RGS1 | BL34 = RGS1 = regulator of | 2.09 | 5.05 | 2.41 |
| | | G-protein signaling which inhibits | | | |
| | | SDF-1 directed B cell migration | | | |
| 594-596 | RGS16 | A28-RGS14p = G protein signaling | 1.22 | 2.32 | 1.9 |
| | | regulator | | | |
| 612-614 | SCYA4 | MIP-1 beta = SCAY2 = G-26 = | 1.29 | 2.23 | 1.73 |
| | | HC21 = pAT 744 = LAG-1 = Act-2 = | | | |
| | | H400 = SIS-gamma = chemokine | | | |
| 612-614 | SCYA4 | MIP-1 beta = SCAY2 = G-26 = HC21 = | 1.09 | 1.79 | 1.64 |
| | | pAT 744 = LAG-1 = Act-2 = H400 = | | | |
| | | SIS-gamma = chemokine | | | |
| 515-517 | SFRP4 | frizzled related protein frpHE | 1.13 | 1.85 | 1.63 |
| 594-596 | RGS16 | A28-RGS14p = G protein signaling | 1.33 | 2.11 | 1.58 |
| | | regulator | | | |
| 790-791 | APEX | APEX nuclease (multifunctional DNA | 0.66 | 1.04 | 1.58 |
| | | repair enzyme) | | | |
| 682 | SFRS11 | splicing factor, arginine/serine-rich 11 | 0.69 | 1.09 | 1.57 |
| 507-509 | PTEN | MMAC1 = PTEN = Tumor suppressor gene | 1.03 | 1.56 | 1.51 |
| | | at 10q23.3 that is Mutated in Multiple | | | |
| | | Advanced Cancers = Phosphatase and | | | |
| | | tensin homolog | | | |
| 774 | PDE6A | phosphodiesterase 6A, cGMP-specific, rod, | 1.23 | 1.85 | 1.51 |
| | | alpha | | | |
| 562-564 | CD83 | CD83 = B-G antigen 1gV domain homolog = | 1.46 | 2.19 | 1.5 |
| | | B-cell activation protein = HB15 | | | |
| 592-593 | ZFP161 | ZF5 = POZ domain zinc finger protein | 1.03 | 1.49 | 1.45 |
| | | ESTs | 1.17 | 1.69 | 1.44 |
| 707-708 | FOXO1A | forkhead box O1A (rhabdomyosarcoma) | 1.38 | 1.93 | 1.4 |
| 762 | FLJ10701 | hypothetical protein FLJ10701 | 1 | 1.4 | 1.39 |
| 577-579 | CD36 | CD36 | 1.32 | 1.82 | 1.38 |
| 797-799 | WNT2 | Wnt-2 | 0.81 | 1.12 | 1.38 |
| | | Unknown | 0.82 | 1.13 | 1.38 |
| 779 | TCF4 | transcription factor 4 | 1.19 | 1.62 | 1.36 |
| 615-617 | KDR | Kinase insert domain receptor (a type III | 0.8 | 1.08 | 1.35 |
| | | receptor tyrosine kinase) | | | |
| | | ESTs | 0.81 | 1.09 | 1.35 |
| 534-535 | LOC51760 | B/K protein | 0.98 | 1.32 | 1.35 |
| 797-799 | WNT2 | Wnt-2 | 0.99 | 1.33 | 1.34 |
| 683-684 | CUGBP1 | CUG triplet repeat, RNA-binding protein 1 | 0.73 | 0.98 | 1.33 |
| 709 | CSRP2 | cysteine and glycine-rich protein 2 | 0.98 | 1.31 | 1.33 |
| | | ESTs, Moderately similar to | 0.81 | 1.06 | 1.32 |
| | | ALU4_HUMAN ALU SUBFAMILY SB2 | | | |
| | | SEQUENCE CONTAMINATION WARNING | | | |
| | | ENTRY [H. sapiens] | | | |
| 606-608 | MMP13 | MMP-13 = Matrix metalloproteinase | 0.99 | 1.3 | 1.32 |
| | | 13 = CL-3 = Collagenase 3 | | | |
| 580-582 | PDGFRB | Platelet-derived growth factor receptor, | 1.41 | 1.85 | 1.31 |
| | | beta polypeptide = fused to TEL in | | | |
| | | t(5; 12)(q33; p13) chronic myelomonocytic | | | |
| | | leukemia | | | |
| 603-605 | ENPP1 | PC-1 = alkaline nucleotide pyro- | 1.01 | 1.32 | 1.31 |
| | | phosphatase | | | |
| | | FGFR2 = Fibroblast growth factor | 0.8 | 1.05 | 1.31 |
| | | receptor 2 | | | |
| 695-696 | SMG1 | PI-3-kinase-related kinase SMG-1 | 1.07 | 1.4 | 1.31 |
| 521-523 | TAL1 | scl = tal-1 = T-cell acute | 1.14 | 1.49 | 1.31 |
| | | lymphocytic leukemia 1 | | | |
| 727-728 | PLXNA2 | plexin A2 | 1.32 | 1.71 | 1.3 |
| 759 | LOC51605 | CGI-09 protein | 0.8 | 1.04 | 1.3 |
| 784 | TNRC12 | trinucleotide repeat containing 12 | 1.02 | 1.33 | 1.3 |
| | | EST | 0.86 | 1.12 | 1.3 |
| 797-799 | WNT2 | wingless-type MMTV integration site | 0.98 | 1.27 | 1.29 |
| | | family member 2 | | | |
| 693-694 | POLR2A | polymerase (RNA) II (DNA directed) | 0.79 | 1.01 | 1.29 |
| | | polypeptide A (220 kD) | | | |
| 737-738 | FLJ21661 | hypothetical protein FLJ21661 | 0.61 | 0.79 | 1.28 |
| 780-781 | RAB2L | RAB2, member RAS oncogene family-like | 1.05 | 1.35 | 1.28 |
| 577-579 | CD36 | CD36 | 1.26 | 1.61 | 1.28 |
| 568-570 | RYBP | Death effector domain-associated factor = | 0.89 | 1.14 | 1.28 |
| | | Binds to Caspase 10 DED domain = Homolog | | | |
| | | of mouse RYBP repressor protein that | | | |
| | | interacts with Polycomb complex and | | | |
| | | YY1 = YAF2 homolog = DEDAF = | | | |
| | | YAF2 homolog = MLNewGene3 | | | |
| 571-573 | ITGAE | CD103 alpha = Integrin alpha-E | 1.09 | 1.38 | 1.27 |
| | | Human SH3 domain-containing protein | 1.23 | 1.56 | 1.27 |
| | | SH3P18 mRNA, complete cds | | | |
| 755-756 | TMEPAI | transmembrane, prostate androgen | 0.99 | 1.25 | 1.26 |
| | | induced RNA | | | |
| 565-567 | NCOA1 | SRC-1 = steroid receptor coactivator | 1.04 | 1.3 | 1.25 |
| 785 | CSNK1E | casein kinase 1, epsilon | 0.74 | 0.92 | 1.25 |
| 768-769 | FLJ21940 | hypothetical protein FLJ21940 | 0.91 | 1.14 | 1.25 |
| 723-724 | SAST | syntrophin associated serine/threonine | 1.05 | 1.32 | 1.25 |
| | | kinase | | | |
| | | ESTs | 0.89 | 1.11 | 1.25 |
| 782-783 | GOLGA1 | golgi autoantigen, golgin subfamily a, 1 | 0.76 | 0.95 | 1.24 |
| 574-576 | IL7 | IL-7 | 0.99 | 1.23 | 1.24 |
| 319 | RNAC | RNA cyclase homolog | 0.92 | 1.13 | 1.24 |
| 676-677 | KIAA0365 | KIAA0365 gene product | 0.97 | 1.2 | 1.23 |
| 679-681 | ARHGEF6 | KIAA0006 | 1.04 | 1.28 | 1.23 |
| 710-711 | BRE | brain and reproductive organ-expressed | 1.11 | 1.35 | 1.22 |
| | | (TNFRSF1A modulator) | | | |
| | | Unknown | 0.9 | 1.11 | 1.22 |
| 670-671 | PON1 | paraoxonase 1 | 0.93 | 1.14 | 1.22 |
| | | ESTs, Weakly similar to I38588 reverse | 1.11 | 1.36 | 1.22 |
| | | transcriptase homolog [H. sapiens] | | | |
| | | ESTs | 0.72 | 0.87 | 1.21 |
| | ATP7A | ATPase, Cu++ transporting, alpha | 0.99 | 1.2 | 1.21 |
| | | polypeptide (Menkes syndrome) | | | |
| | | Unknown | 1.2 | 1.45 | 1.21 |
| 735-736 | CRB1 | crumbs (Drosophila) homolog 1 | 0.88 | 1.06 | 1.21 |
| 757-758 | ZNF211 | zinc finger protein 211 | 0.82 | 0.99 | 1.21 |
| | | ESTs | 0.99 | 1.16 | 1.18 |
| 685-686 | GABRP | gamma-aminobutyric acid (GABA) A | 0.91 | 1.07 | 1.17 |
| | | receptor, pi | | | |
| 687-688 | BMP6 | bone morphogenetic protein 6 | 0.95 | 1.1 | 1.16 |
| 587-588 | BAD | BAD = bbc6 = proapoptotic | 1.11 | 0.94 | 0.85 |
| | | Bcl-2 homolog | | | |
| 678 | NCSTN | nicastrin | 1.13 | 0.94 | 0.83 |
| 766-767 | F23149_1 | hypothetical protein F23149_1 | 1.11 | 0.91 | 0.82 |
| 701-702 | FLJ12442 | hypothetical protein FLJ12442 | 1.04 | 0.85 | 0.82 |
| 589-591 | ZNF173 | acid finger protein | 1.16 | 0.95 | 0.81 |
| 741-742 | GCAT | glycine C-acetyltransferase (2-amino- | 1.12 | 0.91 | 0.81 |
| | | 3-ketobutyrate coenzyme A ligase) | | | |
| 786-787 | AFP | alpha-fetoprotein | 1.2 | 0.96 | 0.8 |
| | | hPAK65 = SER/THR-protein kinase | 1.05 | 0.84 | 0.8 |
| | | PAK-gamma = P21-activated kinase 3 | | | |
| 747-748 | LOX | lysyl oxidase | 0.93 | 0.75 | 0.8 |
| 662-663 | HARS | histidyl-tRNA synthetase | 0.73 | 0.57 | 0.79 |
| 544 | SLC25A11 | solute carrier family 25 (mitochondrial | 1.27 | 1 | 0.78 |
| | | carrier; oxoglutarate carrier), member 11 | | | |
| 697-698 | GTPBP1 | GP-1 = putative G-protein | 0.97 | 0.76 | 0.78 |
| 699-700 | GS2NA | nuclear autoantigen | 0.96 | 0.75 | 0.78 |
| 705-706 | KIAA0144 | KIAA0144 gene product | 0.87 | 0.68 | 0.78 |
| | | Unknown | 1.02 | 0.79 | 0.78 |
| 733-734 | PPY2 | pancreatic polypeptide 2 | 1.49 | 1.16 | 0.78 |
| 653-654 | NAGA | N-acetylgalactosaminidase, alpha- | 1.06 | 0.82 | 0.78 |
| 583-584 | IL17R | IL-17 receptor | 1.05 | 0.82 | 0.78 |
| 657-658 | SLC9A1 | solute carrier family 9 (sodium/hydrogen | 0.97 | 0.75 | 0.77 |
| | | exchanger), isoform 1 (antiporter, | | | |
| | | Na+/H+, amiloride sensitive) | | | |
| 691-692 | RBBP4 | retinoblastoma-binding protein 4 | 0.87 | 0.67 | 0.76 |
| 609-611 | ILK | ILK = integrin-linked kinase | 0.88 | 0.67 | 0.76 |
| 624-625 | PTK2B | protein tyrosine kinase PYK2 | 1.07 | 0.81 | 0.76 |
| 504-506 | AKT1 | BPGF-1 = bone-derived growth factor = | 0.75 | 0.56 | 0.75 |
| | | Q6 = quiescin = expression is induced | | | |
| | | by reversible growth arrest, trypsinization | | | |
| | | and serum starvation and is blocked by | | | |
| | | SV40 transformation | | | |
| 763-764 | DKFZP564C186 | DKFZP564C186 protein | 0.97 | 0.73 | 0.75 |
| 554-556 | SCYB5 | ENA78 = chemokine | 0.34 | 0.25 | 0.75 |
| 660-661 | MNAT1 | menage a trois 1 (CAK assembly factor) | 1.24 | 0.93 | 0.75 |
| 548-550 | TCEB2 | Elongin B = RNA polymerase II transcription | 0.98 | 0.73 | 0.74 |
| | | factor SIII p18 subunit | | | |
| 792-793 | RBBP2 | retinoblastoma-binding protein 2 | 1.47 | 1.08 | 0.74 |
| 626-628 | MAP2K3 | Dual specificity mitogen-activated protein | 1.06 | 0.78 | 0.74 |
| | | kinase kinase 3 | | | |
| 712-713 | RALY | RNA-binding protein (autoantigenic) | 0.85 | 0.62 | 0.74 |
| 743-744 | P14L | similar to Bos taurus P14 protein | 0.87 | 0.64 | 0.73 |
| 731-732 | APMCF1 | APMCF1 protein | 0.95 | 0.7 | 0.73 |
| 674-675 | GNB2 | guanine nucleotide binding protein (G | 0.99 | 0.73 | 0.73 |
| | | protein), beta polypeptide 2 | | | |
| | | Lymphotoxin-Beta receptor precursor = | 1.28 | 0.93 | 0.73 |
| | | Tumor necrosis factor receptor 2 related | | | |
| | | protein = Tumor necrosis factor C receptor | | | |
| | | ESTs | 1.02 | 0.73 | 0.72 |
| 666-667 | MPI | mannose phosphate isomerase | 1.22 | 0.87 | 0.71 |
| 719-720 | PEF | PEF protein with a long N-terminal | 1 | 0.71 | 0.71 |
| | | hydrophobic domain (peflin) | | | |
| 651-652 | FDFT1 | farnesyl-diphosphate farnesyltransferase 1 | 1.09 | 0.77 | 0.71 |
| 739-740 | RAB3A | RAB3A, member RAS oncogene family | 0.8 | 0.57 | 0.71 |
| | | EST | 1.49 | 1.05 | 0.71 |
| 621-623 | PPP2R5A | phosphatase 2A B56-alpha (PP2A) | 0.89 | 0.63 | 0.71 |
| 600-602 | GART | Phosphoribosylglycinamide formyltransferase, | 0.82 | 0.58 | 0.7 |
| | | phosphoribosylglycinamide synthetase, | | | |
| | | phosphoribosylaminoimidazole synthetase | | | |
| 551-553 | NM23H1 | nm23-H1 = NDP kinase A = Nucleoside | 0.71 | 0.49 | 0.7 |
| | | dephophate kinase A | | | |
| 655-656 | SECRET | secretagogin | 0.84 | 0.58 | 0.69 |
| | | Unknown | 0.8 | 0.55 | 0.69 |
| | | EST | 1.19 | 0.82 | 0.69 |
| 770-771 | FLJ22059 | hypothetical protein FLJ22059 | 0.7 | 0.49 | 0.69 |
| 659 | TUFM | Tu translation elongation factor, mitochondrial | 1.16 | 0.8 | 0.69 |
| 518-520 | RUNX1 | core binding factor alpha 1b subunit = CBF | 0.69 | 0.47 | 0.69 |
| | | alpha1 = PEBP2aA1 transcription factor = | | | |
| | | AML1 Proto-oncogene = translocated in | | | |
| | | acute myeloid leukemia | | | |
| 585-586 | HGF | Hepatocyte growth factor (hepapoietin A; | 0.88 | 0.6 | 0.68 |
| | | scatter factor) | | | |
| | | EST, Weakly similar to PRPP_HUMAN SALIVARY | 0.98 | 0.67 | 0.68 |
| | | PROLINE-RICH PROTEIN II-1 [H. sapiens] | | | |
| | | Unknown | 1.02 | 0.7 | 0.68 |
| | | Human mRNA for unknown product, partial cds | 0.57 | 0.39 | 0.68 |
| 618-620 | IL18R1 | IL-18 receptor 1 = 1L-1Rrp | 0.88 | 0.6 | 0.68 |
| 510-512 | UBL1 | ubiquitin-homology domain protein PIC1 | 1.49 | 1.01 | 0.68 |
| 703-704 | KIAA0218 | KIAA0218 gene product | 1.2 | 0.81 | 0.68 |
| 760-761 | MAPRE1 | microtubule-associated protein, RP/EB family, | 0.6 | 0.4 | 0.67 |
| | | member 1 | | | |
| 777 | SF3B4 | splicing factor 3b, subunit 4, 49 kD | 1.17 | 0.78 | 0.67 |
| | | Unknown | 1.04 | 0.7 | 0.67 |
| | | ESTs | 0.42 | 0.28 | 0.66 |
| 533 | UBE1 | ubiquitin-activating enzyme E1 (A1S9T and | 1.54 | 1.01 | 0.66 |
| | | BN75 temperature sensitivity complementing) | | | |
| | | Unknown | 1.23 | 0.81 | 0.66 |
| 788-789 | COVA1 | cytosolic ovarian carcinoma antigen 1 | 0.57 | 0.37 | 0.64 |
| | | Unknown | 0.82 | 0.53 | 0.64 |
| 668-669 | TAGLN2 | transgelin 2 | 0.7 | 0.44 | 0.64 |
| 749-750 | PISD | phosphatidylserine decarboxylase | 0.8 | 0.5 | 0.62 |
| 775-776 | IL1B | interleukin 1, beta | 0.3 | 0.17 | 0.58 |
| 429-430 | CALU | calumenin | 0.7 | 0.39 | 0.56 |
| 597-599 | PPP1CB | PPP1CB = Protein phosphatase 1, catalytic | 0.78 | 0.44 | 0.56 |
| | | subunit, beta isoform | | | |
| 751-752 | | ESTs, Weakly similar to A Chain A, Cyclophilin A | 0.78 | 0.43 | 0.55 |
| | | [H. sapiens] | | | |
| 745-746 | KIAA0008 | KIAA0008 gene product | 0.49 | 0.27 | 0.55 |
| | | Unknown | 2 | 1.09 | 0.54 |
| 664-665 | EIF4A1 | eukaryotic translation initiation factor 4A, | 0.7 | 0.37 | 0.53 |
| | | isoform 1 | | | |
| 559-561 | S100A4 | S100 calcium binding protein A4 = Placental | 2.28 | 1.21 | 0.53 |
| | | calcium binding protein = Calvasculin = | | | |
| | | mts1 PROTEIN = CAPL | | | |
| 375 | PPIA | peptidylprolyl isomerase A (cyclophilin A) | 0.76 | 0.39 | 0.52 |
| | | EST | 2.56 | 1.26 | 0.49 |

[0364] TABLE 10
Markers that can be used to Classify BRCA1-like from BRCA2-like Tumor Types using Compound Covariate Prediction Analysis.

| | | | | Average | | |
|---|---|---|---|---|---|---|
| | | | | Log ratios | Midpoint of | Average log |
| | | | | in BRCA2 | average log- | ratios in |
| SEQ ID | | | | & BRCA2-like | ratios in | BRCA1&BRCA1- |
| NO: | Gene | Description | t-value | sporadics* | each class | like sporadic |
| 659 | TUFM | Tu translation elongation factor, | −10 | −0.09854 | −0.016 | 0.067443 |
| | | mitochondrial | | | | |
| 749-750 | PISD | phosphatidylserine decarboxylase | −8.2305 | −0.28567 | −0.187 | −0.08778 |
| 745-746 | KIAA0008 | KIAA0008 gene product | −8.0421 | −0.56864 | −0.431 | −0.29414 |
| 703-704 | KIAA0218 | KIAA0218 gene product | −7.9288 | −0.08197 | −0.005 | 0.071882 |
| 751-752 | EST | ESTs, Weakly similar to A Chain A, | −7.6225 | −0.34775 | −0.225 | −0.10292 |
| | | Cyclophilin A [H. sapiens] | | | | |
| 621-623 | PPP2R5A | phosphatase 2A B56-alpha (PP2A) | −7.469 | −0.20343 | −0.121 | −0.03763 |
| 733-734 | PPY2 | pancreatic polypeptide 2 | −7.3866 | 0.06558 | 0.113 | 0.160168 |
| 649 | EST | Unknown | −7.384 | −0.27327 | −0.183 | −0.09313 |
| 641 | EST | EST, Weakly similar to PRPP_HUMAN | −7.3561 | −0.17457 | −0.095 | −0.01592 |
| | | SALIVARY PROLINE-RICH PROTEIN II-1 | | | | |
| | | [H. sapiens] | | | | |
| 375 | PPIA | peptidylprolyl isomerase A | −6.9946 | −0.38934 | −0.258 | −0.12668 |
| | | (cyclophilin A) | | | | |
| 770-771 | FLJ22059 | hypothetical protein FLJ22059 | −6.9726 | −0.31605 | −0.228 | −0.14026 |
| 739 | RAB3A | RAB3A, member RAS oncogene family | −6.9458 | −0.23582 | −0.167 | −0.098 |
| 655-656 | SECRET | secretagogin | −6.9307 | −0.23657 | −0.147 | −0.0575 |
| 629-631 | TNFR2RP | Lymphotoxin-Beta receptor precursor = | −6.9268 | −0.02733 | 0.038 | 0.103462 |
| | | Tumor necrosis factor receptor 2 related | | | | |
| | | protein = Tumor necrosis factor C | | | | |
| | | receptor | | | | |
| 551-553 | NM23H1 | nm23-H1 = NDP kinase A = Nucleoside | −6.8307 | −0.32239 | −0.242 | −0.16241 |
| | | dephophate kinase A | | | | |
| 557-558 | PAK2 | hPAK65 = SER/THR-protein kinase PAK- | −6.7214 | −0.1152 | −0.05 | 0.01536 |
| | | gamma = P21-activated kinase 3 | | | | |
| 806 | APRT | adenine phosphoribosyltransferase | −6.6725 | 0.044932 | 0.085 | 0.125156 |
| 807-808 | PPP1R15A | protein phosphatase 1, regulatory | −6.648 | −0.21681 | −0.144 | −0.0716 |
| | | (inhibitor) subunit 15A | | | | |
| 544 | SLC25A11 | solute carrier family 25 (mitochondrial | −6.6083 | 0.003461 | 0.047 | 0.089905 |
| | | carrier; oxoglutarate carrier), member 11 | | | | |
| 719-720 | PEF | PEF protein with a long N-terminal | −6.6034 | −0.16368 | −0.088 | −0.01144 |
| | | hydrophobic domain (peflin) | | | | |
| 747-748 | LOX | lysyl oxidase | −6.4441 | −0.12784 | −0.077 | −0.02641 |
| 775-776 | IL1B | interleukin 1, beta | −6.4272 | −0.75203 | −0.637 | −0.52288 |
| 809-810 | MPHOSPH10 | M-phase phosphoprotein 10 (U3 small | −6.425 | −0.10347 | −0.048 | 0.007748 |
| | | nucleolar ribonucleoprotein) | | | | |
| 653-654 | NAGA | N-acetylgalactosaminidase, alpha- | −6.42 | −0.09205 | −0.034 | 0.024896 |
| 760-761 | MAPRE1 | microtubule-associated protein, | −6.39 | −0.39254 | −0.296 | −0.19928 |
| | | RP/EB family, member 1 | | | | |
| 811-812 | ARD1 | N-acetyltransferase, homolog of | −6.3833 | −0.1707 | −0.11 | −0.04915 |
| | | S. cerevisiae ARD1 | | | | |
| 813-814 | CDC6 | CDC6 (cell division cycle 6, | −6.371 | −0.25964 | −0.201 | −0.14327 |
| | | S. cerevisiae) homolog | | | | |
| 643 | EST | EST | −6.3541 | 0.133858 | 0.253 | 0.371068 |
| 583-584 | IL17R | IL-17 receptor | −6.3499 | −0.08991 | −0.035 | 0.019532 |
| 803 | WNT5B | wingless-type MMTV integration site | −6.3391 | −0.06803 | −0.017 | 0.035029 |
| | | family, member 5B | | | | |
| 651-652 | FDFT1 | farnesyl-diphosphate farnesyltransferase 1 | −6.3387 | −0.1152 | −0.038 | 0.039414 |
| 664-665 | EIF4A1 | eukaryotic translation initiation | −6.2705 | −0.39362 | −0.263 | −0.13253 |
| | | factor 4A, isoform 1 | | | | |
| 650 | EST | Unknown | −6.2573 | −0.08355 | −0.002 | 0.079181 |
| 657-658 | SLC9A1 | solute carrier family 9 (sodium/hydrogen | −6.2571 | −0.13608 | −0.077 | −0.01682 |
| | | exchanger), isoform 1 (antiporter, Na+/H+, | | | | |
| | | amiloride sensitive) | | | | |
| 731-732 | APMCF1 | APMCF1 protein | −6.2387 | −0.15677 | −0.083 | −0.00922 |
| 503 | ZNF220 | zinc finger protein 220 | −6.2316 | −0.13549 | −0.072 | −0.00922 |
| 815-816 | PTPRCAP | LPAP = lymphoid-restricted phospho- | −6.229 | −0.10182 | −0.059 | −0.01592 |
| | | protein = CD45 phosphatase binding | | | | |
| | | protein and putative substrate | | | | |
| 817 | POLD3 | polymerase (DNA directed), delta 3 | −6.223 | −0.29843 | −0.221 | −0.14327 |
| 788-789 | COVA1 | cytosolic ovarian carcinoma antigen 1 | −6.1802 | −0.42946 | −0.321 | −0.21325 |
| 701-702 | FLJ12442 | hypothetical protein FLJ12442 | −6.1607 | −0.07676 | −0.027 | 0.023252 |
| 818 | EST | Unknown | −6.1033 | −0.12494 | −0.057 | 0.011993 |
| 721-722 | EST | Human mRNA for unknown product, | −6.1032 | −0.40671 | −0.328 | −0.24949 |
| | | partial cds | | | | |
| 662-663 | HARS | histidyl-tRNA synthetase | −6.0889 | −0.24642 | −0.186 | −0.12552 |
| 819 | FLJ20746 | putative cyclin G1 interacting protein | −6.0827 | −0.04144 | 0.017 | 0.074451 |
| 820-821 | PLK | pLK = homologue of Drosophila polo | −6.0725 | −0.32422 | −0.253 | −0.18177 |
| | | serine/threonine kinase | | | | |
| 784 | TNRC12 | trinucleotide repeat containing 12 | 6.0744 | 0.110253 | 0.062 | 0.01368 |
| 723-724 | SAST | syntrophin associated serine/threonine | 6.0991 | 0.107549 | 0.065 | 0.022016 |
| | | kinase | | | | |
| 634-635 | EST | ESTs | 6.1178 | 0.048053 | −0.002 | −0.05306 |
| 695-696 | SMG1 | PI-3-kinase-related kinase SMG-1 | 6.1219 | 0.146438 | 0.087 | 0.028571 |
| 534-535 | LOC51760 | B/K protein | 6.1306 | 0.09691 | 0.048 | −0.00174 |
| 574-576 | IL7 | IL-7 | 6.1558 | 0.088845 | 0.043 | −0.00305 |
| 670-671 | PON1 | paraoxonase 1 | 6.3314 | 0.058046 | 0.014 | −0.03105 |
| 592-593 | ZFP161 | ZF5 = POZ domain zinc finger protein | 6.3356 | 0.196176 | 0.101 | 0.006466 |
| 632-633 | EST | ESTs, Moderately similar to | 6.3426 | 0.028978 | −0.029 | −0.08725 |
| | | ALU4_HUMAN ALU SUBFAMILY SB2 SEQUENCE | | | | |
| | | CONTAMINATION WARNING ENTRY [H. sapiens] | | | | |
| 765 | | ESTs | 6.4363 | 0.026533 | −0.03 | −0.08619 |
| 822 | CCR6 | CCR6 = STRL22 = chemokine receptor | 6.4897 | 0.116276 | 0.069 | 0.022016 |
| | | for MIP-3 alpha/LARC/Exodus on | | | | |
| | | activated B cells | | | | |
| 679-681 | ARHGEF6 | KIAA0006 | 6.5098 | 0.105169 | 0.065 | 0.024075 |
| 759 | LOC51605 | CGI-09 protein | 6.662 | 0.0086 | −0.042 | −0.09205 |
| 762 | FLJ10701 | hypothetical protein FLJ10701 | 6.925 | 0.135133 | 0.075 | 0.0141 |
| 636 | EST | Unknown | 7.3197 | 0.050766 | 0.005 | −0.04144 |
| 647 | EST | EST | 7.5484 | 0.045714 | −0.012 | −0.07007 |
| 725-726 | EST | Unknown | 8.058 | 0.068557 | −0.006 | −0.07988 |

[0365] TABLE 11
Results of Compound Covariate Predictor Analysis.

| | Pre-specified | Correctly |
|---|---|---|
| Expld | class label | classified |
| B2-1 vs OSE B2-1 vs OSE 21083 | 1 | YES |
| B2-10 vs OSE B2-10 vs OSE 21085 | 1 | YES |
| B2-16 vs OSE B2-16 vs OSE 21180 | 1 | YES |
| B2-2 vs OSE B2-2 vs OSE 21090 | 1 | YES |
| B2-20 vs OSE B2-20 vs OSE 21181 | 1 | YES |
| B2-21 vs OSE B2-21 vs OSE 21182 | 1 | YES |
| B2-22 vs OSE B2-22 vs OSE 21183 | 1 | YES |
| B2-23 vs OSE B2-23 vs OSE 21091 | 1 | YES |
| B2-24 vs OSE B2-24 vs OSE 21092 | 1 | NO |
| B2-25 vs OSE B2-25 vs OSE 22038 | 1 | YES |
| B2-3 vs OSE B2-3 vs OSE 21093 | 1 | YES |
| B2-4 vs OSE B2-4 vs OSE 21094 | 1 | YES |
| B2-5 vs OSE B2-5 vs OSE 21095 | 1 | NO |
| B2-7 vs OSE B2-7 vs OSE 21096 | 1 | YES |
| B2-8 vs OSE B2-8 vs OSE 21097 | 1 | YES |
| B2-9 vs OSE B2-9 vs OSE 21098 | 1 | YES |
| C100 vs OSE C100 vs OSE 21167 | 1 | YES |
| C102 vs OSE C102 vs OSE 21168 | 1 | YES |
| C103 vs OSE C103 vs OSE 21169 | 1 | YES |
| C105 vs OSE C105 vs OSE 21178 | 1 | YES |
| C107 vs OSE C107 vs OSE 21099 | 1 | YES |
| C110 vs OSE C110 vs OSE 21101 | 1 | YES |
| C111 vs OSE C111 vs OSE 21102 | 1 | NO |
| C117 vs OSE C117 vs OSE 21105 | 1 | YES |
| C118 vs OSE C118 vs OSE 21106 | 1 | YES |
| C123 vs OSE C123 vs OSE 21107 | 1 | YES |
| C46 vs OSE C46 vs OSE 19741 | 1 | NO |
| C77 vs OSE C77 vs OSE 21108 | 1 | YES |
| C84 vs OSE C84 vs OSE 21368 | 1 | YES |
| C85 vs OSE C85 vs OSE 21179 | 1 | YES |
| C99 vs OSE C99 vs OSE 21370 | 1 | YES |
| B36 vs OSE B36 vs OSE 19680 | 2 | YES |
| B39 vs OSE B39 vs OSE 19682 | 2 | YES |
| B40 vs OSE B40 vs OSE 19683 | 2 | YES |
| B41 vs OSE B41 vs OSE 19684 | 2 | YES |
| B52-2 vs OSE B52-2 vs OSE 19771 | 2 | NO |
| B54 vs OSE B54 vs OSE 19687 | 2 | YES |
| B55 vs OSE B55 vs OSE 19688 | 2 | YES |
| B60 vs OSE B60 vs OSE 19690 | 2 | YES |
| B61 vs OSE B61 vs OSE 19695 | 2 | YES |
| B62 vs OSE B62 vs OSE 19701 | 2 | YES |
| B63 vs OSE B63 vs OSE 19706 | 2 | YES |
| B64 vs OSE B64 vs OSE 19713 | 2 | YES |
| B70 vs OSE B70 vs OSE 19722 | 2 | YES |
| B74 vs OSE B74 vs OSE 19727 | 2 | YES |
| B77 vs OSE B77 vs OSE 19731 | 2 | YES |
| B78 vs OSE B78 vs OSE 21103 | 2 | YES |
| B79 vs OSE B79 vs OSE 19743 | 2 | YES |
| B80 vs OSE B80 vs OSE 21088 | 2 | YES |
| C114 vs OSE C114 vs OSE 21104 | 2 | YES |
| C15 vs OSE C15 vs OSE 19734 | 2 | YES |
| C16 vs OSE C16 vs OSE 19735 | 2 | YES |
| C17 vs OSE C17 vs OSE 19736 | 2 | YES |
| C1 vs OSE C1 vs OSE 19732 | 2 | YES |
| C20 vs OSE C20 vs OSE 19737 | 2 | YES |
| C41 vs OSE C41 vs OSE 19739 | 2 | YES |
| C42 vs OSE C42 vs OSE 19740 | 2 | YES |
| C49 vs OSE C49 vs OSE 19742 | 2 | YES |
| C79 vs OSE C79 vs OSE 21367 | 2 | YES |
| C87 vs OSE C87 vs OSE 19744 | 2 | YES |
| C95 vs OSE C95 vs OSE 21369 | 2 | YES |
| | Overall Success | 91.80% |

1. A method of classifying an ovarian tumor as a BRCA-1-like or BRCA-2-like or non-BRCA-like tumor, comprising:
determining a pattern of expression in the ovarian tumor of a plurality of markers listed in Table 1, wherein the pattern of expression in the ovarian tumor is determined relative to a standard ovarian tissue;
comparing a similarity of the pattern of expression of the plurality of markers in the ovarian tumor to a pattern of expression of the plurality of markers in a comparison tissue of a known BRCA-1-like or BRCA-2-like or non-BRCA-like tumor, wherein the pattern of expression in the comparison tissue is determined relative to the standard ovarian tissue;
wherein a similarity of the pattern of expression in the ovarian tumor to a pattern of expression of the comparison tissue of the known BRCA-1-like tumor classifies the ovarian tumor as a BRCA-1-like tumor, a similarity of the pattern of expression in the ovarian tumor to a pattern of expression of the known BRCA-2-like tumor classifies the ovarian tumor as a BRCA-2-like tumor, and a similarity of the pattern of expression in the ovarian tumor to a pattern of expression of the known non-BRCA-like tumor classifies the ovarian tumor as a non-BRCA-like tumor.

2. The method of claim 1, wherein the method comprises determining a pattern of over-expression or under-expression of the plurality of markers in the ovarian tumor to over-expression or under-expression of the plurality of markers of the comparison tissue.

3. The method of claim 2, wherein the method comprises determining a pattern of both over-expression and under-expression of the plurality of markers in the ovarian tumor to over-expression or under-expression of the plurality of markers in the comparison tissue.

4. The method of claim 1 wherein the comparison tissue is from a known BRCA-1-like tumor, and the method comprises determining whether the ovarian tumor is a BRCA-1-like tumor by comparing the pattern of expression in the ovarian tumor to the pattern of expression in the comparison tissue.

5. The method of claim 1 wherein the comparison tissue is from a subject known to have a mutation in BRCA-1 and the method comprises determining whether the ovarian tumor is a BRCA-1-like tumor by comparing the pattern of expression in the ovarian tumor to the pattern of expression in the comparison tissue.

6. The method of claim 1 wherein the comparison tissue is from a subject known to have a mutation in BRCA-2 and the method comprises determining whether the ovarian tumor is a BRCA-2-like tumor by comparing the pattern of expression in the ovarian tumor to the pattern of expression in the comparison tissue.

7. The method of claim 1 wherein the comparison tissue is from a known BRCA-2-like tumor, and the method comprises determining whether the ovarian tumor is BRCA-2-like by comparing the pattern of expression in the ovarian tumor to the pattern of expression in the comparison tissue.

8. The method of claim 7, wherein classifying the ovarian tumor comprises determining whether a tumor that does not contain a BRCA-1 or BRCA-2 mutation is BRCA-1-like or BRCA-2-like.

9. The method of claim 1 wherein the comparison tissue is from a known non-BRCA-like tumor, and the method comprises determining whether the ovarian tumor is non-BRCA-like by comparing the pattern of expression in the ovarian tumor to the pattern of expression in the comparison tissue.

10. The method of claim 1, wherein the standard ovarian tissue is tissue from an immortalized ovarian cell, ovarian tissue from a subject not having ovarian cancer, a subject not predisposed to developing ovarian cancer, or ovarian tissue from a subject from whom the ovarian tumor was obtained at an earlier point in time.

11. The method of claim 1, wherein the patterns of expression are patterns of logarithmic expression ratios.

12. The method of claim 1, wherein the patterns of expression are multidimensional scaling patterns.

13. The method of claim 12 wherein the multi-dimensional scaling patterns are visually compared to determine similarities.

14. The method of claim 1, wherein the patterns of expression are hierarchical clustering patterns.

15. The method of claim 14, wherein standard normal deviation values of the logarithmic expression ratios are assigned relative color intensities that assist in the visual comparison.

16. The method of claim 15, wherein the hierarchical clustering patters are visually compared to determine similarities.

17. The method of claim 11 comprising comparing the logarithmic expression ratios of the plurality markers using compound covariate predictor analysis.

18. The method of claim 11, wherein the method comprises differentiating a BRCA1-like ovarian tumor from a sporadic ovarian tumor by comparing relative logarithmic expression ratios of at least one marker shown in Table 6.

19. The method of claim 18, wherein differentiating a BRCA1-linked ovarian tumor from a sporadic ovarian tumor comprises comparing the relative logarithmic expression ratios of CD72 (SEQ ID NO: 805), SLC25A11 (SEQ ID NO: 544), LCN2 (SEQ ID NO: 545-547), PSTP1P1(SEQ ID NO: 538-540), SIAHBP1 (SEQ ID NO: 543), UBE1 (SEQ ID NO: 533), WAS (SEQ ID NO: 524-526), IDH2 (SEQ ID NO: 541-542), or PCTK1 (SEQ ID NO: 527-528) in the ovarian tumor and comparison tissue.

20. The method of claim 11, wherein the method comprises differentiating a BRCA2-like ovarian tumor from a non-BRCA-like ovarian tumor by comparing relative logarithmic expression ratios of at least one marker shown in Table 7.

21. The method of claim 20, wherein the method comprises comparing the relative logarithmic expression ratios of LOC51760 (SEQ ID NO: 279) or LRPAP1 (SEQ ID NO: 280) to differentiate a BRCA2-like ovarian tumor from a non-BRCA like ovarian tumor

22. The method of claim 21, wherein the method comprises differentiating a non-BRCA-like tumor from a BRCA-1-like or BRCA-2-like ovarian tumor by comparing relative logarithmic expression ratios of at least one marker shown in Table 8.

23. The method of claim 22, wherein the method comprises comparing relative logarithmic expression ratios of PSTP1P1 (SEQ ID NO: 281), IDH2 (SEQ ID NO: 282), or PCTK1 (SEQ ID NO: 274) to differentiate a combined BRCA1- and BRCA2-linked ovarian tumor from a sporadic ovarian tumor.

24. The method of claim 11, wherein the method comprises differentiating a BRCA1-like ovarian tumor from a BRCA2-like ovarian tumor by comparing relative logarithmic expression ratios of at least one marker shown in Table 10.

25. The method of claim 1, wherein the method further comprises selecting a treatment strategy based on classifying the ovarian tumor as BRCA1-like, BRCA2-like or non-BRCA-like.

26. The method of claim 25, wherein the treatment strategy comprises selecting a more aggressive treatment regimen for a BRCA1-like or BRCA2-like tumor.

27. The method of claim 26, wherein the treatment is chemotherapy, radiotherapy, or surgical removal of the affected tissue and/or surrounding area.

28. The method of claim 25, further comprising treating the subject with the selected treatment.

29. The method of claim 11, wherein comparing the patterns of logarithmic expression ratios comprises comparing the logarithmic expression ratios to patterns of logarithmic expression ratios in a database of patterns associated with BRCA1-like, BRCA2-like or non-BRCA-like ovarian tumors.

30. The method of claim 11, wherein comparing patterns of logarithmic expression ratios of the plurality of markers comprises obtaining the pattern of expression of the plurality of markers on an array.

31. The method of claim 1, wherein the pattern of expression of the plurality of markers comprises over-expression of one or more markers compared to the standard.

32. The method of claim 29, wherein the one or more markers that is overexpressed is listed in Table 5.

33. The method of claim 32, wherein determining the pattern of expression comprises providing nucleic acid sequences of the markers, and performing nucleic acid hybridization of specific oligonucleotide probes to the nucleic acid sequences.

34. The method of claim 33, wherein the sequence of the oligonucleotide probe is selected to bind specifically to a nucleic acid molecule listed in Table 1.

35. The method of claim 34, further comprising amplifying the one or more markers prior to performing nucleic acid hybridization.

36. The method of claim 33, further comprising quantitating hybridization to detect a level of differential expression.

37. The method of claim 33, wherein providing sequences of the markers comprises providing the nucleic acid sequences on an array carrying the plurality of markers.

38. The method of claim 37, wherein the array is a cDNA microarray.

39. The method of claim 33, wherein providing the nucleic acid sequences of the markers comprises providing at least 50 of the markers listed in Table 1.

40. The method of claim 33, wherein providing the nucleic acid sequences of the markers comprises providing at least 100 of the markers listed in Table 1.

41. The method of claim 33, wherein providing the nucleic acid sequences of the markers comprises providing at least 200 of the markers listed in Table 1.

42. A method of diagnosing or prognosing development or progression of ovarian cancer in a subject comprising detecting under-expression of one or more markers in Table 4 relative to a standard.

43. The method of claim 42, wherein the standard is immortalized ovarian epithelial cells, ovarian tissue from a subject not having cancer or a subject not predisposed to developing cancer, or ovarian tissue from the subject at an earlier point in time.

44. The method of claim 42 wherein the one or more markers comprise a nucleic acid encoded by SEQ ID NOs: 449-503.

45. A method of diagnosing or prognosing development or progression of ovarian cancer in a subject comprising detecting over-expression of one or more markers in Table 5 relative to a standard.

46. The method of claim 45, wherein the standard is immortalized ovarian epithelial cells, ovarian tissue from a subject not having cancer or a subject not predisposed to developing cancer, or ovarian tissue from the subject at an earlier point in time.

47. The method of claim 45 wherein the one or more markers comprise a nucleic acid encoded by SEQ ID NOs: 18-19, 30-31, 50-51, 52-54, 55-57, 58-59, 60, 68-69, 74-76, 85-86, 87-88, 89-91, 92-93, 94-95, 97-99, 122-123, 133-135, 149-151, 164-166, 167-168, 169-170, 174-175, 176-178, 179-180, 181-182, 190-192, or 199-201.

48. A method of screening for an agent for treating or inhibiting ovarian cancer in a subject, comprising exposing a tumor cell to a therapeutically effective amount of a pharmaceutical compound that restores wild-type expression of at least one BRCA1-like or BRCA2-like marker listed in Table 1.

49. The method of claim 48 wherein the agent corrects under-expression or over-expression of a marker listed in Table 1.

50. A method of monitoring a response to therapy for an ovarian tumor, comprising monitoring expression of the markers in the subject following administration of the therapy.

51. A method of diagnosing or prognosing development or progression of ovarian cancer in a subject comprising detecting differential expression of a gene that maps to Chromosome Xp11.2.

52. A kit for classifying one or more ovarian tumors as sporadic, BRCA1-like or BRCA2-like tumors, comprising components for measuring expression levels of markers in the one or more ovarian tumor samples and for comparing the expression levels of the markers to the markers in Table 10.

53. The kit of claim 52, wherein the expression levels of a plurality of markers from each tumor are measured.

54. The kit of claim 52, comprising an array carrying a plurality of markers.

55. The kit of claim 52, comprising a binding molecule that selectively binds to a marker in the one or more tumor samples, and wherein the marker is listed in Table 10.

56. The kit of claim 52, wherein the expression levels measured are of a non-BRCA-like, BRCA1-like or BRCA2-like tumor protein, and the binding molecule is an antibody or antibody fragment that selectively binds the tumor protein.

57. The kit of claim 52, wherein the expression levels measured are of a BRCA-like, BRCA1-like or BRCA2-like nucleic acid marker, and the binding molecule is an oligonucleotide capable of hybridizing to the nucleic acid molecule marker.

The application's sequence listing, which the Patent Office published only in electronic form, follows.

SEQUENCE LISTING (822 sequences)

SEQ ID NO: 1 - DNA, 63 bp, Artificial sequence
  Synthesized nucleic acid sequence.
  misc_feature (1)..(63): "N" is any nucleic acid.
ggccagtgaattgtaatacgactcactatagggaggcggtttttttttttttttttttttttt

SEQ ID NO: 2 - DNA, 20 bp, Artificial sequence.
  Primer.
atgtggatcagcaagcagga

SEQ ID NO: 3 - DNA, 20 bp, Artificial sequence.
  Primer.
ggtggcttttaggatggcaa

SEQ ID NO: 4 - DNA, 21 bp, Artificial sequence.
  Primer.
ttcggcttcaccctagtctca

SEQ ID NO: 5 - DNA, 22 bp, Artificial sequence.
  Primer.
agagggaatacagagtcccgaa

SEQ ID NO: 6 - DNA, 21 bp, Artificial sequence.
  Primer.
accctgatgaatatgccagca

SEQ ID NO: 7 - DNA, 21 bp, Artificial sequence.
  Primer.
gctacttgcttttggagggta

SEQ ID NO: 8 - DNA, 22 bp, Artificial sequence.
  Primer.
gactcttatcccaggttcctca

SEQ ID NO: 9 - DNA, 22 bp, Artificial sequence.
  Primer.
tgactccctggttttaagagca

SEQ ID NO: 10 - DNA, 20 bp, Artificial sequence.
  Primer.
ccagtccccatgtgagagca

SEQ ID NO: 11 - DNA, 22 bp, Artificial sequence.
  Primer.
agctgataacaagcttggctga

SEQ ID NO: 12 - DNA, 21 bp, Artificial sequence.
  Primer.
tgtccctccacgagaaacaga

SEQ ID NO: 13 - DNA, 21 bp, Artificial sequence.
  Primer.
cgtacagattttgcccgagga

SEQ ID NO: 14 - DNA, 20 bp, Artificial sequence.
  Primer.
gcgagttgagcctaaggtga

SEQ ID NO: 15 - DNA, 20 bp, Artificial sequence.
  Primer.
ttgaagatgaggcgctgtca

SEQ ID NO: 16 - DNA, 302 bp, Homo sapiens
ttacaatttgattttactttatgtgaatactatcacacacataatatttacagatgtaattaaacagaatttataagattaccatgtggaatatttttcaaagttaatctgaaactcttaatgaaaatcatcaatacatgtgtgttacaatacaataatagaatgtagaacttttcagccaatatcatgatggttcatttaataaaaactctcttttcaaaaagaggtaagtcggaggaaatataaaaaaaaattcagaaaaaatatttccatatctagtcataatcttccagcttttctgt

SEQ ID NO: 17 - DNA, 554 bp, Homo sapiens
cataatccctacattttctgtctgttctagtctaagaatattgttatagatggaagttaggaccaattagcccacagatgcgtgtattctctcagacataccggtgtagatgccatatttctgatgtcttcttaatgtctgtgaaagcaactggcatctacaataaatcacacttagaactggttagaggactccctcacttttgttgtccatgtggttcccttccgtggaccagccgtaataaagagccaaggtagtgatggtggccacgtgcctcgttgctatttttaaagtaatattcagatgtggttttaaatttagattatgtattccttttgaaacataagaaaaacatttaaacctatgctgaaaatacgataaaagaaaaacaactccaatatgctaaaagttaaatatggtatttaagaaaatagtcatgtatgcattgagaaagtctataatttattttacagaaaagctggaagattatgactagatatggaaatattttttctgaattttttgttataattcctccggactacctctttttg

SEQ ID NO: 18 - DNA, 404 bp, Homo sapiens
  misc_feature (1)..(404): "n" is an unknown nucleotide.
ttttttttttttttttttttttttgcccattcattctttattcaggtggcataaaaatcactacaaaaacctttacaaaagagccttaaggagctcatggganccttccctgcctcggttcctgagctcccgggcagaggagggagacaggagaggaaggaagggaaatnctggcagttttgggatctcgaggagccgtgggaagtntggcntgacaaggcacagggggtaggatggaggctgatggantntcggcaggttaggccacagcaggntttgccagacacganttccacgcgggnntgaggacaacgtttcgcctcccgagccaccaccaggggcccttttttccccaccntagcctagggtttcccggggacaantccaaaggcagccntttcccc

SEQ ID NO: 19 - DNA, 247 bp, Homo sapiens
  misc_feature (1)..(247): "n" is an unknown nucleotide.
cggggagccgggagcctgaccctcatctttcttccaaacaggctcagagggtgtcctgcaccggggcctgggcaggagggaggtgcttctagttctgccaggagacaggttagctgctccccacgtcagctgggacancccgacttttgtttaccagagaaaaangattggggaganggctncctttggacttntcccggganacctagggttaagggttgggaaaaaacggnccctgggnggttgc

SEQ ID NO: 20 - DNA, 6041 bp, Homo sapiens
  misc_feature (1)..(6041)
gggaggcggtcccgggatttcaagggtctacgcgcttttctatggcgaatgcaacccgacgagggagtgggctgtatcttcagagttgtctccgtctttccaagaacagaacaaaatgaacaaggtagaacagaagtcccaggagtcagtatcatttaaagatgtgactgtgggcttcacccaggaggagtggcagcacctggaccctagtcagagggctctgtatagagatgtgatgctggagaactacagcaaccttgtctcagtggggtattgtgttcacaaaccagaggtgatcttcaggctgcaacaaggagaagagccatggaaacaggaggaagaattcccaagccaaagctttccagtctggacagctgatcacctgaaagagaggagccaagaaaaccaatctaaacatttgtgggaagttgtattcatcaataatgaaatgctgactaaggaacaaggtgatgtaataggaataccatttaatgtggatgtaagttcttttccttccagaaaaatgttctgtcagtgtgattcatgtggaatgagtttcaacactgtttcagaattggttatcagtaagataaactatttaggaaaaaagtctgatgaatttaatgcctgtgggaaattgttactcaatattaagcatgatgaaactcatactcaagagaaaaatgaagttttgaaaaataggaacacactgagtcatcatgaggagactttgcagcatgagaagattcaaactttagagcacaattttgaatacagtatatgtcaggaaaccctccttgaaaaggcagtattcaatacacagaagagagagaacgcagaagagaataactgtgattataatgaatttgggagaactttgtgtgatagttcatccctcttgttccatcagatatctccgtcaagggacaatcactatgaatttagtgattgtgagaagttcttatgtgtgaagtccaccctttctaaacctcatggggtatctatgaaacactatgattgtggtgaaagtgggaataatttcaggaggaaattgtgtctgtcacaccttcagaaaggtgataaaggagagaaacactttgaatgtaatgaatgtgggaaagctttctgggagaagtcacatctcactcgacatcagagggtgcacacaggacagaaaccctttcaatgtaatgaatgtgaaaaagctttctgggataagtcaaacctcactaaacatcaaagatcacacacaggggagaaaccttttgaatgcaatgaatgtgggaaagcctttagccataagtcagccctcacattacaccagagaacacatacaggggagaaaccctatcaatgtaatgcgtgtgggaaaactttttgccagaaatctgacctcactaaacatcagagaacacacacagggctgaaaccctatgaatgttatgaatgtggaaaatccttccgtgtgacttcgcaccttaaagtacaccagagaactcacacaggtgagaaaccttttgaatgtcttgagtgtgggaaatcctttagtgaaaagtcaaatcttacacagcatcagagaattcacataggagataaatcttatgaatgtaatgcatgtgggaaaactttctaccacaagtcattactcaccaggcatcagataattcatacagggtggaaaccttatgaatgttatgaatgtgggaaaaccttctgcttgaagtcagacctcacagtacatcagagaacacacacagggcagaaaccctttgcatgtcccgaatgtgggaaattctttagccataagtcaaccctctctcaacattatagaacacacacaggggagaaaccctacgaatgtcatgaatgtggaaaaatcttttacaataaatcatacctaactaaacataatagaacacatacaggggagaaaccctatgaatgtaatgaatgtggaaaagccttctaccagaagtcacaactcactcagcatcagagaattcacataggggagaaaccctataaatgtaatgagtgtggaaaagctttctgccataagtcagctctaattgtacatcagagaacccatacacaagaaaagccctataaatgtaatgaatgtggaaaatctttctgtgtaaaatcaggacttattttccatgagagaaagcacacgggggagaaaccctatgaatgcaatgaatgtgggaaattcttcaggcacaaatcatcactcacagtacatcacagggctcacacaggagagaaatcttgtcaatgtaatgaatgtggaaaaatcttttaccgtaaatcggaacttgctcaacatcagagatcacatacaggggaaaagccctatgaatgtaacacatgcaggaaaactttctctcaaaagtcaaatctcattgtacatcagagaagacatataggagaaaaccttatgaatgaaatggatattagaaatttccagccacaagtcagcctccataatgcctcagagtattcacactgtggagaaagccctgatgacatcctgaatgttcagtaactatccacaaactcaccttatgttactccaaagtaatagtaggggataaacccatagactacaacaattataggacagcttttgttaggaagtgatattctatgtaatatcagatggttaatacgggcataacaccttacagattttttttgaatttgtgaaagtttttggcaaaaatgcaaataaggttatgttagaatttacactgaggagaaaattgtcaatttaagaaatctaaagtgaaaattttgcttagaaataaaatacgacaagttatgttttgagtttgatgccataatagtttttagggcacctaacaataatttatagatgtatattgtggaatgtaaagctttaagaacttaaacaaaggtaataattaaaataacctcacaagaagtttaatgagtagagagaattcccatgtacacttcaccaaacttcctctaaggataatgtataatcatagtatatggtcaagtccaagaaatcgatgttaccttgctggtagatagagacttagtcagattttactatggtttgcatgcactctgtgtgtgtgtgtacgtgtatgtgtgtgtgtgtggttatatcaaacttttacgacttttacatttgagtaaccatcaacacgattagtttacagaactgaaaaggaatctgagatctgtactgtatcaggattacaaaggatttagcctcaagtagttccctttttgtattaataaccacacgctttctgcaaccctatcccttgcatccacttgactatgaagtttttttaaagcacagataaattgaataatcagggcaatagcattaagcacatctgcgaattatccctgaagttcaaaagacttatatatgtataagtggtatgtgatataaatcgtgtgtttcatatgcataatggaatttaacgtaattgtgaataggaagtaggtatcctagtttagtagtggttacattatcaggcccatcccagatgtttgtgatgtcctgaaacaatttaaaaggagacccacagagctaatgtttatccatttaaaaggtataaatcaaaataacaaattatctaaaaaaaatctatcctgtacatgtgaagatctaggctcgcctccatgttactccctttctcttcctacctgtggctcatgccatgccatgaagtgcctagggtacatatgtgaacattccagccttcagcataagtggtagtccaaattttctttaagcagctgctctccaagacagggccctggaaaggcccacacatacagcccagggctgcccagggctgttggactgtcatttcaaggctcattgtccccagacagggatctgggccctcagacttttgagaatatgaagaggagggttgaggctggagcagaaccagaatcaagctggtgtggggcttttattgatagtgtgaagattgtacactatattacatgatcagatcatacaaataatctaagattatacagtctagtgatcctagattacacaagtaatctaagcttccactttaggaaactagaaaaagaagagcaaattaaatccaaagtaacctgaaaaaacattagagtaaaaatcattgaaattgaaaagagaaaatcgataaaacccaaaactggttccttgaaaaggtcagtaaaattgataaacctctagctagcttaagaacaaacagaagacaaatattgctaataccaaaaatgaaagaggccatcacagctaatcctatggtcaccaaaaggattagaaagaaacatggacaactctgtccataaatttgataacttagctaaaatggaccaattccttgcaagacgcattctctcaaagctcacacaagatagacctcaataggcatatgtatctattaaataaaccaaagcagtaattaataaccttccaaggccaggtacagtggttcatgcctgtaatcccagcacttcactttgggaggctgaggcgggtggatcacaaggtcaggagttcgagaccagcctggtcaacatggtgaaaccccctatctactaaaaatacaaaaaattagctgggcatggtggcatgcgtgtgtagtcgaagctactcaggaggctgaggcagaagaatcacttgaacctgggaggtggatgttgcagtgagctgagattgtgccactgtactgcagcctgggtgacagaatgagactgcatctcaaaaaataataatgaaactttccaaaacaaagtgccaggaccagctgggttcactgatgtgtttttgagatacttaaggtagaaatgataccaagtctctaccatctctttcagaaaataaaagcagagataacacttcccaactcattttgtgaggccagtattaccctaatagcaaaaccaggcaaagatattacaagaaaggaaaactacagatcaatatttccattgaacacagatgcagaaatcctcaaaatattagcaaatcaggaatgcaaggcttgttcaacatttgatattcagtgtaatccattgcatgcattagcagctcaaagatgaaatacgatcatatcaataggtacagaaaaagcatttgacaaaatccaatatccattcatgttaaaacctctcaacacagaaggaatacaggagaacttactcaagttggtaaagaacatactacaaaaaaccctacagctaacattatccttgatgtttccaactagacactttcctactaagatcaggaacatggcaaggaacaccacaccactgcttttcagcattgtactggaagtgctatataatgcagtgttaaaaaaaaaagaaataaaatgcacatagatttgaaaggatgaaatacaactttgttcacaagtaacatgattgtctttgtagagaattctaaataacaaaaaccctgctgacattaataagcaattacagcaggattgcaggatacagtcctcaggtagatgataaaaaggaattggacatcaagtcattaaaagacacggagaaaccctaaatgcttattgttaagtgaaaaccaatctgaaaaggctttctattttgtatgattgcaattatatgacattttgggagaggcaaaactattgagccagtgaaaggaccagtggttgctgagagttgaggggaaaggagggatggcaggtagagaggtgatttttaaggcagtgaaagtactctctagggtactgtaatttgtcaaaacgcagagaatggaaaacagtgaacggaaaacacagagtaaaccctaatgtcaactctggacttcagttaataataatgtatcactgttggctcattaattgtaacaaatgaaccataatgatgcaagatgttaatgattggggagcctgtggaagatgggaggggaaagggttatatgagaattctctatactttttgctcaactttctgtaaccctaaagctactcttaaaaatgaagtgtatcaagtaaataaataaccaaccaacc

SEQ ID NO: 21 - DNA, 424 bp, Homo sapiens
ggttggttatttacttatttatttacttaatacacttcattttttagagcagctttagggttacagaaaaattgagcaaaaagtacagagaattctcatataaacctttaaccctcccatcctccacaggctccccaattattaacatcttgcatcattatggttcatttgttacaattgatgagccaatagtggtacactgttattaactgaagtccagagttgacactagggtttactctgtgttttccgttcactgttttccattctctgcattttgacaaattacagtaccctacagagtactttcactgtcctaaaaatcacctacctgccatccctcctttcccctcaactctcagcaaccactggtcctttgactcgctcgatagttttgcctctcccagaatgtcatataattggc

SEQ ID NO: 22 - DNA, 454 bp, Homo sapiens
  misc_feature (1)..(454): "n" is an unknown nucleotide.
caacacagaaggaatacaggagaacttactcaatttgataaagaactactacaaaaaaccctacatctagcatcatccttgatgtttccaactaaatgctttcctactaagatcaggaacatggcaaggaacaccactgcttttcagcattgtactggaagtgctatctaatgcagtgataccaaaaaaaaaggaaataaaatgcacataaatttggaaggagaaaatacaactgtctttgttctcaaataacatgattgtctttgtagaaaattcaaataacaaaaacctgctgacattaataagcaattatagcagggttgtagaatgtagtcctcaggtatatgataaaaaagaattagacatcaagtcattaaaagacatataggaaccctaaatgcttattgttaagtgaaaaccaatctgaaaagggctttcnatgttgtatgattgc

SEQ ID NO: 23 - DNA, 448 bp, Homo sapiens
  misc_feature (1)..(448): "n" is an unknown nucleotide.
nggtatcactgcattagatagcacttccagtacaatgctgaaaanagtggtgttccttgccatgttcctgatcttagtaggaaagcatttagttggaaacatcaaggatgatgctagatgtagggttttttgtagtagttctttatcaaattgagtaagttctcctgtattccttctgtgttgagaggttttatcatgaatggatattggattttgtcaaatgctttttctgtacctattgatatgatcatatttaatctttgaactgctaatgcatgcaatggattgcactgaatatcaaatgttgaacaaggcttgcattcctgatttgctaacattttaaggatttctgcatctgtgttcactgggaaatattgatctgtagttttcctttcttgtaatgtttttgcctggctttggtattagggtaatccngggcctcacaaaa

SEQ ID NO: 24 - DNA, 445 bp, Homo sapiens
acttagctaaaatggatcaattccttgcaagatgcattctctcaaagctcataaaaggtagatctcagtaggcatatatatctattaaataaattgaagcagtaattaataactttccaagaccaggcgcggtggctaaaaatacaaaaagttagccgggcgtggtggcatgcgtgtatagtccaagctactcaggaggctgaggcagaagaatcacttgaacctgggaggtggaggttgcagtgagccaagattgtgccactgtactccagcctgggtgacagagtgagactccatctcaataaaattaataataataaaaccttccaaaaaaaagtgccggggaccaaatgggattcactgatgtgcatttttccgagatacttaaggtagaaatggatacccaagtctggtactggtctctttcagaaaattaaaaagcagg

SEQ ID NO: 25 - DNA, 376 bp, Homo sapiens
  misc_feature (1)..(376): "n" is an unknown nucleotide.
tnnncagatggagtctcactctgtcacccaggctggagtgcagtggcgcgatctcagctcactgcaacctctgcctcctgggcagtgtgttggcaaggttgtggagaaactggaatccttttgccctgttggtgggaatgtgaaaaggtgcagccactttggaaacagtatgggaggctgagttgtgaggatcacttgaactcaggagtttgtggttcctcaaaattaaacacaganttaccatatgatccagtagtgcccttctgggttcctacccaaaagaatcgaaagcagggtcccaaagagatagttgtacacttatattcatagcagccttattcacangagggcaaaggcaacccaagtgttnatcaac

SEQ ID NO: 26 - DNA, 404 bp, Homo sapiens
  misc_feature (1)..(404): "n" is an unknown nucleotide.
ttatagngatggggtcttgctgtgttgcctgggctggactcaaacttctggggtcaagcgattctcccacctcagcctcccagagtttgcagattacagccataagccaccgtgcccagccctctgcagtttctaaaagaggttcatcaatacaaattctcagcatcattctccaattaggctcccccattaaccaattgtttctaatgaccgattattaatttgcaagagaattcttcctctaactcataccatcccactcagacagagttcagtattttccttcactttaatttttattgcttctccagttcaggataattcagcgcttcctcttttcttcttcctcaccttgttcatgggctgggctgttccatcaggcaggnactacaaaaccaggnaag

SEQ ID NO: 27 - DNA, 416 bp, Homo sapiens
  misc_feature (1)..(416): "n" is an unknown nucleotide.
attttcagttggtctccgttgccatgtgggagaccaaaagtctaaccaagtgattagtagccatcccagtgatgttcttgaccataaattgagagctcagcacattcctggcaccgaattgccattcatttattacctgatatcattctcacattcacaagctttatgagctcattttacaggtgagtgatttgttcaagatcacacagctaataatggcagagctggggctttgggactctgggtctgtgtggctccagacaccaccttcttttttcatattcccccacagcctccttgggaggatggccgaggaaaccttttcaaattttgttggccctttctgggttttgttaggttctgcttgatggggacagcccaggcccttggaacaagggtnaggggaggnagggaag

SEQ ID NO: 28 - DNA, 479 bp, Homo sapiens
ttgagacagagtctcgctctgtcgctcaggctggaatgcagtggcgcgatctcggctcactgccaacagctctgcctctaccgtggggtatattttaaaattatacacatgcacacatatatatcctaaacgaaatacgtggcatgtagtaagtgatcaataaatgcaggtcttcagccccaatgaagtggtctgccatgctaccccaaatcaatgtccttcttgactgctaagctggctgtcaaataataccctagtaatatctgctcaggtctccgggtgcaggtaggcagctgctatgccagcaaggtattcgggctgcttgtccccacatctctcttcttccctactacccgggtttactgcatctaatcattacctggatatcaccacaaaaagcattactaccaggttttaccagatactggcattttattttaattggaattgttccccatggataattctggttaacttta

SEQ ID NO: 29 - DNA, 512 bp, Homo sapiens
  misc_feature (1)..(512): "n" is an unknown nucleotide.
ggcacgaggattatattttgcatctccctgcaagtctgttttatgttatttatagcttcctattcgtgtagacaccagcagtaaactggggaatatttgtggcaggaatttctaagaacaacctttagcatcatctcaggccctgatccatttccttttccacaaaattgtttgagattatatcgtatgtgttacagaaagaatgtttttctgtatgctcgaaactgtatactaaagtaaaataataaagttaaccagaattatccatggggaacaattccaattaaaataaaatgccagtatctggtaaaacctggtagtaatgctttttgtggtgatatccaggtaatgattagatgcagtaaacccgggtagtagggaagaagagagatgtggggacaagcagcccgaataccttgctggcatagcagctgcctacctgcacccggagacctgagcagatattactagggtatttatttgacagccagcttagcagtcangaaggacan

SEQ ID NO: 30 - DNA, 435 bp, Homo sapiens
attcagatataaatgaaacactcttccttctttatttttatttcctctccccagcttttcattctctttcagtcttcctttctgtttttcgtttgtttgttttgttttatttggtttttttgagccaggatctcactctttctccctggctagagtacagtggcacaatctcagctcactgtagcctccacctccaaggctcaatcaatcatcctgagtaactgggactacaggcacgtgccatcatacccagctaatttttgtggggtttgttttgttctttcttattttttttttttttttttcgcagtggagatggggtttcatcatgttgcccaggctagttttcctttctatatacagaaaaatttaaagtgaatgtgatgttggagagagtgggaaggaaaagtaatggcaagtatgcttgctcattac

SEQ ID NO: 31 - DNA, 449 bp, Homo sapiens
  misc_feature (1)..(449): "n" is an unknown nucleotide.
aggaaaaaggttacangttttngtttactgagagtaaaancacctgcatctggaagangggctggtaaattggtttggctacagaacagaaagaaaacaaaaacaaacctcgtaagggaagtatcgcactcagacaccaccacttcctagagccaaatgagcaatcccaaactgcaagtgccgtaagtgggcctgtgacgtcacancgcccggcccgaggtatcgcatgtgcgggggaggtccacactacagctgtcctctcgtctagaaggcaccacctcgctttcatgtcccgtgtgttttggaaaagcagtatggtgtgtcatgtctagcggcgacacttcccttcctctgtccttgaggttgttatatnaaactgtgtttctgtangtgttggtgggnattcctggcggtgctcgttcattncccagcttcgctgggtcctgact

SEQ ID NO: 32 - DNA, 190 bp, Homo sapiens
gccatatagcctttttcctaattaagagaaccacatcctattcctaacttattactattaatgacaacacaggcatcaaacttcaaggtgacttgtttgggcaccctttttcttttgttttggctaacactttactcatatcgtttatgagcccccaccaggtttcagtccttaatcttaaaaactgtgg

SEQ ID NO: 33 - DNA, 480 bp, Homo sapiens
  misc_feature (1)..(480): "n" is an unknown nucleotide.
aacagcaatgagcttttcatgagttaaaagaaaaactcctgttggccccagcctgaggtacccgacctgacaaaagcctttacactctatgtgtcagaaaaagaaaacacggcagttggagttttaacccagactgtggggccctggcaaggccagtcgctaatnctctcaaaacaactagacggggtttccaaaggctggcccccatggctaagggcctggcagcaatggccctgttagcacaagaagcagataaactaacccttgggcaaaacctgaatataaagacccccccatgctgtggtaactttgatgaataccaaaggacatcattggctaacaaatgctagattaaccaagtaccaaagcttgctatgtgaaaatccccacataaccattgaagtttgcgacaccctaaaccctgccaccttgctcccggtatcagagaagcccagttgaatatcactgtgttgtattgca

SEQ ID NO: 34 - DNA, 457 bp, Homo sapiens
  misc_feature (1)..(457): "n" is an unknown nucleotide.
atgtctacaaggttttattaaaattaagtttaacattaataacacactaatataaaggtaaaatttagcttatctggtataaaagtcatacaggaagcattagtaaatataaaatagcgtttagctttcttttgtctaaaaactaataaaaattggtgctaaaggaagcattcattttactagaggatcataaaagttaaagacttaaaacaaactttggcaattaagacagcataccaagatgcaaatgcctggttgaaatggatcaaatattccatctgcaggttaaacaaaagcaattagcatgcttgtgcacatggcaggccagagaccctgattgtcccccttccactaaggtggtcctccagtcgggccaggcatgggctgcatggtagctcttttccaggattctatagcctggagtaataagtcatgccaagctctctcctgctatatn

SEQ ID NO: 35 - DNA, 449 bp, Homo sapiens
ggactccttgcggggcttcagttgcatctaaatagatgtgagagttgaaagacctataaggggcttttctcgctttatgatgtcttcttcttattattattttttcctcttgttgatgaaatgtcagggtgaaagggatagccaaatggactaaagcacaagtgccactctagttactccggcagagtccccaataaaggtctaccacaataccaccacacatccgctttgggatgaacaagggctgactgagtgataagctcttgaaaattcttaagctcactgcatcccttcaggtctccaaggaatgctaagtctcctccctgccatgagagacacgtagtaaacttagtgttgggagatggaagctggatggccctcgggggcttggacctggcagggactttgggatatagcagagagagcttggcatgacttattactccagg

SEQ ID NO: 36 - DNA, 365 bp, Homo sapiens
  misc_feature (1)..(365): "n" is an unknown nucleotide.
ttgcaaataacagtgtttattgatgatgagtccaggtggtagaggctacagtgagctgtgatcatgccactgcattccagcctgagtgacagagccagaccctgtctcaaaaacaaacaaacaaacaaaaaaaagntcactcagggagcactagagggccactgaagagtgccggagaggantcagattaccaggtaggagctgctgcgtactccaggcaggagtnttacatgaaagtgactgaaccaaggcagttntcctgagcacgggagagtggaagcaggctgaaacatcactgcttaggtntgaaatctntaaaacctttgggctaatatgtaggattgaggaggggaagggtgcccaac

SEQ ID NO: 37 - DNA, 428 bp, Homo sapiens
  misc_feature (1)..(428): "n" is an unknown nucleotide.
tgagagtgaggggagaagaatcataaggtaagctctcagagatacgagggtcaaggagaatataatatcttacattccctaacgcacctcttgctcttttgtgtttttgcatgtgacttcatgctggttgtcctctggactgttgtgaccttggcgccctcagtttcctcatcttattggtccctgtacttctaatagtcagtgggctgacagtccacacccctctgcagggctccagacctgggctgtctgactttccagcaggctgtcccctcggtcatgccgcagacttttcacactgtgtccgaagctggagccttggatctgttcctggaacttggctgcccctctttttgtcctcttcccattccactccactgttttgtggctaggaaagtggggggagatnattgttggggcacnttccc

SEQ ID NO: 38 - DNA, 250 bp, Homo sapiens
tatgtgggaatatttattaacataattttgtttaacacatttctttctacacaaactgaatttaaaagtgtctataacattttcaattacagtaataacacatgaataaattataaattaacaaaatcttcatatctactttaaaaaatcatttatcaaatgctaacctccagattatctgggaaaattaaagttgcaaattgctataaacctgggcatcccaattaaattacagtttttaaagggtata

SEQ ID NO: 39 - DNA, 357 bp, Homo sapiens
  misc_feature (1)..(357): "n" is an unknown nucleotide.
ttgaaaaacatataatttacttcttataaattgaagtcttaaatgtgaaaccaagaaatgtaatcaagcagtaaaaacatctgaatgtagaccatgatctcaagttcttccattttctcccccacgagtggaaaatagacttctacataggaaagctaaaatatgttaatatttttaaattaaaggtttaatatcagaatgcagtccaaagagcaaatcatattacataattacattttaattaaatataggaatattctactgaattgccaatttattaaatattcttatcctcttaaataaaactggctcaacagtttaatcagcngtggattcatcttggcggctatgcnattt

SEQ ID NO: 40 - DNA, 386 bp, Homo sapiens
  misc_feature (1)..(386): "n" is an unknown nucleotide.
tttttttttggtttgagggggaatgctggagaaaacatcaacattgagttgacatttgttttgctgaagtatagctaccatccactatcatgaatttttgtttcattacaaatgatagaaaagccagattctcaaaataaagtataattctttgtattaaataaatgtttataaatgtttatgaagctcattacattatcttttttaaaaaagtaaaanttttagaacatatgacgcttttcataattaatgcttttgatatagatttgaggaaagagtctccagtttgcagttctgaaaatgtaattttcaaattaaatttcattggcatttgagggtgacaccttccnctataatttcattacccggattgtaaggtttccccc

SEQ ID NO: 41 - DNA, 2403 bp, Homo sapiens
ggagactcccacgtggacaccagctccaccgtgtccgaggcggtggccgaagaagtatctcttttcagcatgacggacatgattctgttttcgctcatcgtgggtctcctaacctactggttcctcttcagaaagaaaaaagaagaagtccccgagttcaccaaaattcagacattgacctcctctgtcagagagagcagctttgtggaaaagatgaagaaaacggggaggaacatcatcgtgttctacggctcccagacggggactgcagaggagtttgccaaccgcctgtccaaggacgcccaccgctacgggatgcgaggcatgtcagcggaccctgaggagtatgacctggccgacctgagcagcctgccagagatcgacaacgccctggtggttttctgcatggccacctacggtgagggagaccccaccgacaatgcccaggacttctacgactggctgcaggagacagacgtggatctctctggggtcaagttcgcggtgtttggtcttgggaacaagacctacgagcacttcaatgccatgggcaagtacgtggacaagcggctggagcagctcggcgcccagcgcatctttgagctggggttgggcgacgacgatgggaacttggaggaggacttcatcacctggcgagagcagttctggccggccgtgtgtgaacactttggggtggaagccactggcgaggagtccagcattcgccagtacgagcttgtggtccacaccgacatagatgcggccaaggtgtacatgggggagatgggccggctgaagagctacgagaaccagaagcccccctttgatgccaagaatccgttcctggctgcagtcaccaccaaccggaagctgaaccagggaaccgagcgccacctcatgcacctggaattggacatctcggactccaaaatcaggtatgaatctggggaccacgtggctgtgtacccagccaacgactctgctctcgtcaaccagctgggcaaaatcctgggtgccgacctggacgtcgtcatgtccctgaacaacctggatgaggagtccaacaagaagcacccattcccgtgccctacgtcctaccgcacggccctcacctactacctggacatcaccaacccgccgcgtaccaacgtgctgtacgagctggcgcagtacgcctcggagccctcggagcaggagctgctgcgcaagatggcctcctcctccggcgagggcaaggagctgtacctgagctgggtggtggaggcccggaggcacatcctggccatcctgcaggactgcccgtccctgcggccccccatcgaccacctgtgtgagctgctgccgcgcctgcaggcccgctactactccatcgcctcatcctccaaggtccaccccaactctgtgcacatctgtgcggtggttgtggagtacgagaccaaggccggccgcatcaacaagggcgtggccaccaactggctgcgggccaaggagcctgtcggggagaacggcggccgtgcgctggtgcccatgttcgtgcgcaagtcccagttacgcctgcccttcaaggccaccacgcctgtcatcatggtgggccccggcaccgggtggcaccctttcataggcttcatccaggagcgggcctggctgcgacagcagggcaaggaggtgggggagacgctgctgtactacggctgccgccgctcggatgaggactacctgtaccgggaggagctggcgcagttccacagggacggtgcgctcacccagctcaacgtggccttctcccgggagcagtcccacaaggtctacgtccagcacctgctaaagcaagaccgagagcacctgtggaagttgatcgaaggcggtgcccacatctacgtctgtggggatgcacggaacatggccagggatgtgcagaacaccttctacgacatcgtggctgagctcggggccatggagcacgcgcaggcggtggactacatcaagaaactgatgaccaagggccgctactccctggacgtgtggagctaggggcctgcctgccccacccaccccacagactccggcctgtaatcagctctcctggctccctcccgtagtctcctgggtgtgtttggcttggccttggcatgggcgcaggcccagtgacaaagactcctctgggcctggggtgcatcctcctcagcccccaggccaggtgaggtccaccggcccctggcagcacagcccagggcctgcatgggggcaccgggctccatgcctctggagcctctggccctcggtggctgcacagaagggctctttctctctgctgagctggcccagcccctccacgtgatttccagtgagtgtaaataattttaaataacctctggcccttggaataaagttctgttttctgta

SEQ ID NO: 42 - DNA, 338 bp, Homo sapiens
  misc_feature (1)..(338): "n" is an unknown nucleotide.
acagaactttattccaagggccagaggttatttaaaattatttacactcactggaaatcacgtggaggggctgggccngactcagcagagagaaagagcccttctgtgcagccaccgagggccagagctcacagnggcatggagcccggtgcccccatgcaggccctgggctgtgctgccaggggccggntggacctcacctggcctgggggctgaggaggatgcaccccaggcccagaggagtctttgtcactgggcctgcgcccatgccaaggccaagccaaacacacccagggagactacggganggagccagggngagctnattacaggccgga

SEQ ID NO: 43 - DNA, 271 bp, Homo sapiens
  misc_feature (1)..(271): "n" is an unknown nucleotide.
gggatgcgagagcatgtcagcggaccctgaggagtatgacctggccgacctgagcagcctgccggagatcgacaacgccctggtggttttctgcatggccacctacggtgagnggagaccccaccgacaatgcccaggacttctacgactggctgcaggagacagacgtggatctctctggggtcaagttcgcggtgtttggtcttnggaacaagacctacgagcacttcaatgccatgggaagttacgtngacaagcngctngagcagct

SEQ ID NO: 44 - DNA, 329 bp, Homo sapiens
  misc_feature (1)..(329): "n" is an unknown nucleotide.
gtgatatttttggcgttttattaaaaatggaaaaagttgttttagtgagcactcatggtgctttctcccctcctcccccaggcagaccccaaaagtgtcagggaaaggcaggccccctggaggggtgcggtggggctgaagcaggggctgctatggctaccagaggtgagctggtgatgtgagctgagttgtcacatgacactctccaccacgacgaccttgctgctctcggacactggggtcagggtggtcaggcccctgacatctgcgtcctgagctcggtactccaagtggtggaggccccagatggngctgggtcaggtgctgcc

SEQ ID NO: 45 - DNA, 248 bp, Homo sapiens
tgagatgtggatgttgcttttgcacctacgggggcatctgagtccagctccccccaagatgagctgcagccccccagagagagctctgcacgtcaccaagtaaccaggccccagcctccaggcccccaactccgcccagcctctccccgctctggatcctgcactctaacactcgactctgctgctcatgggaagaacagaattgctcctgcatgcaactaattcaataaaactgtcttgtgagctga

SEQ ID NO: 46 - DNA, 228 bp, Homo sapiens
acttaaaaatagttgtatttatattccacaatttgttcaaatactggttttcttataaactttctacaggatgtttttaaacaaattcttcacattgtgttttgactatgtacttacggaatttcagggaaatagttctgtgtatttttaatagcttaatttgtactaaagggatgggtagggtgggtcacatgcagtccatgtggggattctaacatgacctcgtgc

SEQ ID NO: 47 - DNA, 222 bp, Homo sapiens
tcatgttagaatcccacatggactgcatgtgaccacctaccatccctttagtacaaattaagctattaaaaatacacagaactatttccctgaaattccgtaagtacatagtcaaaacacaatgtgaagaatttgtttaaaaacatcctgtaggaaagtttataaggaaaaccagtatttgaacaaattgtgggaatattaaatacaactatttttaaggta

SEQ ID NO: 48 - DNA, 308 bp, Homo sapiens
ttttttttttttttttttttttttttttttttttttttttttttttttttttttttttttttttttttttttttttttttttttggggggaaaaaaaaccttaatccccaaagggggggggggcccaaaaaaacaaaaacccccccaccaagactggggaaaaaaaaaaccgggggccttttaaaaaacccccctggggaaacaaaaaaaaaccccccccccaggggggggggccccctttttagccccaaacccgggttaaaagcccccaaaaaagggatttaaaagggcccccccgggggcccaaa

SEQ ID NO: 49 - DNA, 232 bp, Homo sapiens
tttttttttttttttttttttttttttttttttttttttttttttttcccccccaagatcataaaaatggtttatggggttaaaaaaaatcacggttgggggaacccttaaacaataagtccacaagaaaggccccagggggcattccatagcaaagacagactccggttggtttaattccaggggcttggcggggggataataaaaggatgggaaatgggggaaaatagat

SEQ ID NO: 50 - DNA, 185 bp, Homo sapiens
cacaagcacgtgcactttattgaatgacactgtagacaggtgtgtgggtataaactgctgtatctaggggcaggaccaagggggcaggggcaacagcccagcgttgcagggccagcattgcacagtggagtgcaaaggttgcaggctatgggcggctactagtaaccccgtttttcctgtattat

SEQ ID NO: 51 - DNA, 226 bp, Homo sapiens
caagtctaccatattatgttacagataatacaggaaaaacggggtactagtagcgccatagcctgcaacctttgcactccatgtgcaatgctggcctgcacgctggggctgttgctgcccccttggtcctgcccctagatacagcagtttatacccacacacctgtctacagtgtcattcaataaagtgcacgtgcttgtgaaaaaaaaaaaaaaaaaaaaaaacc

SEQ ID NO: 52 - DNA, 853 bp, Homo sapiens
ctagtcctgacttcacttctgatgaggaagcctctctccttagccttcagcctttcctcccaccctgccataagtaatttgatcctcaagaagttaaaccacacctcattggtccctggctaattcaccaatttacaaacagcaggaaatagaaacttaagagaaatacacacttctgagaaactgaaacgacaggggaaaggaggtctcactgagcaccgtcccagcatccggacaccacagcggcccttcgctccacgcagaaaaccacacttctcaaaccttcactcaacacttccttccccaaagccagaagatgcacaaggaggaacatgaggtggctgtgctgggggcaccccccagcaccatccttccaaggtccaccgtgatcaacatccacagcgagacctccgtgcccgaccatgtcgtctggtccctgttcaacaccctcttcttgaactggtgctgtctgggcttcatagcattcgcctactccgtgaagtctagggacaggaagatggttggcgacgtgaccggggcccaggcctatgcctccaccgccaagtgcctgaacatctgggccctgattctgggcatcctcatgaccattggattcatcctgtcactggtattcggctctgtgacagtctaccatattatgttacagataatacaggaaaaacggggttactagtagccgcccatagcctgcaacctttgcactccactgtgcaatgctggccctgcacgctggggctgttgcccctgcccccttggtcctgcccctagatacagcagtttatacccacacacctgtctacagtgtcattcaataaagtgcacgtgcttgtga

SEQ ID NO: 53 - DNA, 430 bp, Homo sapiens
  misc_feature (1)..(430): "n" is an unknown nucleotide.
tcatcacaagcacgtgcactttattgaatgacactgtagacaggtgtgtgggtataaactgctgtatctaggggcaggaccaagggggcaggggcaacagccangcgttgcagggccagcattgcacagtggagtgcaaaggttgcaggctatgggcggctactagtaaccccgtttttcctgtattatctgtaacataatatgggtagactgtcacagagccgaataccagtaacaggatgaatccaatggtcatgaggatgcccagaatcagggcccagatgttcaggcacttggcggtggaggcataggccttgggccccggtcacgtcgccaaccatcttcctgtcccttcacggagtaggcgaatgtatnaaagcccagacngcaccagttcaagaanagggtgttgaacagggaccagacgacg

SEQ ID NO: 54 - DNA, 399 bp, Homo sapiens
  misc_feature (1)..(399): "n" is an unknown nucleotide.
gaaaggaggtctcactgagcaccgtcccagcatccggacaccacagcggcccttcgctccacgcagaaaaccacacttctcaaaccttcactcaacacttccttccccaaagccagaagatgcacaaggaggaacatggggtggctgtgctgggggcacccccanaacatccttccaaggtccaccgtgatcaacatccacagcgagacctccgtgcccgaccatgtcgtctggtccctgttcaacaccctcttcttgaactggtgctgtctgggcttcatagcattccgcctactccgtgaagggacaggaagatgggttggcgacgtgaccggggcccaggcctaatgcctccaaccgccaagtgcctgaacatctgggccctgattntgggatcca

SEQ ID NO: 55 - DNA, 905 bp, Homo sapiens
caacacaggggcagtctccaggacctccacaccattaacaagatgagccttgtgctcccttgggctctagagaggaagcccctctgagccctcagcccctctttcctccctctcctaaagtaatttgatcctcaggaatttgttctgccctcatctggccctggccagctctgcatttgacaaatgccaggaagaggaaactgttgagaaaacggaactactggggaaagggagggctcactgagaaccatcccggtaacccgaccgccgctggtcaccatgaaccacattgtgcaaaccttctctcctgtcaacagcggccagcctcccaactacgagatgctcaaggaggagcaggaagtggctatgctgggggggccccacaaccctgctcccccgacgtccaccgtgatccacatccgcagcgagacctccgtgcctgaccatgtcgtctggtccctgttcaacaccctcttcatgaacacctgctgcctgggcttcatagcattcgcctactccgtgaagtctagggacaggaagatggttggcgacgtgaccggggcccaggcctatgcctccaccgccaagtgcctgaacatctgggccctgattttgggcatcttcatgaccattctgctcgtcatcatcccagtgttggtcgtccaggcccagcgatagatcaggaggcatcattgaggccaggagctctgcccgtgacctgtatcccacgtactctatcttccattcctcgccctgcccccagaggccaggagctctgcccttgacctgtattccacttactccaccttccattcctcgccctgtccccacagccgagtcctgcatcagccctttatcctcacacgcttttctacaatggcattcaataaagtgtatatgtttct

SEQ ID NO: 56 - DNA, 401 bp, Homo sapiens
  misc_feature (1)..(401): "n" is an unknown nucleotide.
taccagaaacatatacactttattgaatgccattgtagaaaagcgtgtgaggataaagggctgatgcaggactcggctgtggggacagggcgaggaatggaaggtggagtaagtggaatacaggtcaagggcagantcctggcctctgggggcagggcgaggaatggaagatagagtacgtgggatacaggtcacgggcagagctcctggcctcaatgatgcctcctgatctatcgctgggcctggacgaccaacactgggatgatgatgagcagaatggtcatgaagatgcccaaaatcagggcccagatgttcaggcacttggcggtggaggcataggcctgggcccggtcacgtcgccaaccatcttcctgtccctagacttcacggagtacgcgaat

SEQ ID NO: 57 - DNA, 603 bp, Homo sapiens
  misc_feature (1)..(603): "n" is an unknown nucleotide.
gctggtcaccatgaaccacattgtgcaaaccttctctcctgtcaacagcggccanctcccaactacgagatgctcaaggaggagcaggaagtggctatgctgggggtgccccacaaccctgctcccccgatgtccaccgtgatccacatccgcagcgagacctccgtgcctgaccatgtggtctggtccctgttcaacaccctcttcatgaacacctgctgcctgggcttcatagcattcgcgtactccgtgaagtctagggacaggaagatggttggcgacgtgaccggggcccaggcctattgcctccaccgccaagtgcctgaacatctggggccctgattttggggcatcttcatgaaccaattcttgctcatcatcatcccagtgttggtcgtccaggcccagcgatngatcaggaggcatcattgaaggccaggagctctgcccgtgacctgtaatcccacgtactctaatctttcaattcttngccctgcccccagaggccaggaagttctgcccttgaactgtaattccaattanttcaactttcaattcctngcctggtcccaaagccgaagttctggaataggcctttatcan

SEQ ID NO: 58 - DNA, 470 bp, Homo sapiens
  misc_feature (1)..(470): "n" is an unknown nucleotide.
tttttaaacatatacactttattgaatgccattgtagaaaagcgtgtgaggataaagggctgatgcaggactcggctgtggggacagggcgaggaatggnaggtggagtaagtggaatacaggtcaagggcagagctcctggcctctgggggcagggcnaggaattggaagatagagtacgtgggatacaggtcacgggcagactcctggcctcaatgatgcctcctgatctatcgctgggcctggacgaccaacactgggatgatgatgagcagaatggtcatgaagatgcccaaaatcacgggcccagatgttcaggcacttggcggtggaggcataggcttgggccccggtcacgtcgccaaccanngtcctgtccctagacttcacggantaggcgaatngtatgaagnccaggcagcaggtgttcatgaagaagggtgttgancanggaccagacgacatggtca

SEQ ID NO: 59 - DNA, 481 bp, Homo sapiens
  misc_feature (1)..(481): "n" is an unknown nucleotide.
ctgaagtgggagcggccanctcccaactacgagatgctcaaggaggagcaggaagtggctatgctgggggcgccccacaaccctgctcccccgatgtccaccgtgatccacatccncagcgagacctccgtgcctgaccatgtcgtctggtccctgttcaacaccctcttcatgaacacctgctgcctgggcttcatagcattcgcctactccgtgaagtctagggacaggaagatggttggcgacgtgaccggggcccaggcctantgcctccaccgccaagtgcctgaacatctgggccctgattttgggcatcttcatgaccattctgctcatcatcatcccagtgttggtcgtccaggcccagcgatagattnaggaggcatcatttgagggncagggagctctgccccgttgaacctgtaatcccaccgtactctatctttcattncttcggnccttgcncccagaggggcatgaa

SEQ ID NO: 60 - DNA, 348 bp, Homo sapiens
tttttttgctgaaagtggttactttattggttgggaaagggagaagctgtggtcagcccaagagggaatacagagtcccgaaaaaggggagggcaggtgggctggaaccagatgcagggccaggcagaaactttctctcctcactgctcagcctggtggtggctggagctcagaaattgggagtgacacaggacaccttcccacagccattgcggcacgatttcatctggccaggacactggctgtccacctggcactggtcccgacagaggccgagctggggaaagttaatgttcacctgggggcaggaaccctccttatcattgggcagagagcagaaggtggcac

SEQ ID NO: 61 - DNA, 204 bp, Homo sapiens
tcagcatgagattcttgtatttgattaattatttgttggttttccttttttaattcctccaaagaaactctgtggtctgtcataaccttctcaaactcttgtatgtgcctaacctgaagtgtgtcctctaattcctttagatgactttgctccaaggactgaagttctgccctcaataactgtaacttctcatcattttcaaca

SEQ ID NO: 62 - DNA, 218 bp, Homo sapiens
gaagacttaaaaaagctccatgttgaaaatgatgagaagttacagttattgagggcagaacttcagtccttggagcaaagtcatctaaaggaattagaggacacacttcaggttaggcacatacaagagtttgagaaggttatgacagaccacagagtttctttggaggaattaaaaaaggaaaaccaacaaataattaatcaaatacaagaatctca

SEQ ID NO: 63 - DNA, 1510 bp, Homo sapiens
gtcaggatttaagtttacctcaaaaatggaagattttaacatggagagtgacagctttgaagatttctggaaaggtgaagatcttagtaattacagttacagctctaccctgcccccttttctactagatgccgccccatgtgaaccagaatccctggaaatcaacaagtattttgtggtcattatctatgccctggtattcctgctgagcctgctgggaaactccctcgtgatgctggtcatcttatacagcagggtcggccgctccgtcactgatgtctacctgctgaacctagccttggccgacctactctttgccctgaccttgcccatctgggccgcctccaaggtgaatggctggatttttggcacattcctgtgcaaggtggtctcactcctgaaggaagtcaacttctatagtggcatcctgctactggcctgcatcagtgtggaccgttacctggccattgtccatgccacacgcacactgacccagaagcgctacttggtcaaattcatatgtctcagcatctggggtctgtccttgctcctggccctgcctgtcttacttttccgaaggaccgtctactcatccaatgttagcccagcctgctatgaggacatgggcaacaatacagcaaactggcggatgctgttacggatcctgccccagtcctttggcttcatcgtgccactgctgatcatgctgttctgctacggattcaccctgcgtacgctgtttaaggcccacatggggcagaagcaccgggccatgcgggtcatctttgctgtcgtcctcatcttcctgctttgctggctgccctacaacctggtcctgctggcagacaccctcatgaggacccaggtgatccaggagacctgtgagcgccgcaatcacatcgaccgggctctggatgccaccgagattctgggcatccttcacagctgcctcaaccccctcatctacgccttcattggccagaagtttcgccatggactcctcaagattctagctatacatggcttgatcagcaaggactccctgcccaaagacagcaggccttcctttgttggctcttcttcagggcacacttccactactctctaagacctcctgcctaagtgcagcccgtggggttcctcccttctcttcacagtcacattccaagcctcatgtccactggttcttcttggtctcagtgtcaatgcagcccccattgtggtcacaggaagcagaggaggccacgttcttactagtttcccttgcatggtttagaaagcttgccctggtgcctcaccccttgccataattactatgtcatttgctggagctctgcccatcctgcccctgagcccatggcactctatgttctaagaagtgaaaatctacactccagtgagacagctctgcatactcattaggatggctagtatcaaaagaaagaaaatcaggctggccaacgggatgaaaccctgtctctactaaaaatacaaaaaaaaaaaaaaaaaa

SEQ ID NO: 64 - DNA, 511 bp, Homo sapiens
gtatttttagtagagacagggtttcatcccgttggccagcctgattttctttcttttgatactagccatcctaatgagtatgcagagctgtctcactggagtgtagattttcacttcttagaacatagagtgccatgggctcaggggcaggatgggcagagctccagcaaatgacatagtaattatggcaaggggtgaggcaccagggcaagctttctaaaccatgcaagggaaactagtaagaacgtggcctcctctgcttcctgtgaccacaatgggggctgcattgacactgagaccaagaagaaccagtggacatgaggcttggaatgtgactgtgaagagaagggaggaaccccacggggctgcacttaggcaggaggtcttagagagtagtggaagtgtgccctgaagaagagccaacaaaggaaggcctgctgtctttgggcagggagtccttgctgatcaagccatgtatagctagaatcttgaggagtccatggcgaaactt

SEQ ID NO: 65 - DNA, 2704 bp, Homo sapiens
gcttagtgtaaccagcggcgtatattttttaggcgccttttcgaaaacctagtagttaatattcatttgtttaaatcttattttatttttaagctcaaactgcttaagaataccttaattccttaaagtgaaataattttttgcaaaggggtttcctcgatttggagctttttttttcttccaccgtcatttctaactcttaaaaccaactcagttccatcatggtgatgttcaagaagatcaagtcttttgaggtggtctttaacgaccctgaaaaggtgtacggcagtggcgagagggtggctggccgggtgatagtggaggtgtgtgaagttactcgtgtcaaagccgttaggatcctggcttgcggagtggctaaagtgctttggatgcagggatcccagcagtgcaaacagacttcggagtacctgcgctatgaagacacgcttcttctggaagaccagccaacaggtgagaatgagatggtgatcatgagacctggaaacaaatatgagtacaagttcggctttgagcttcctcaggggcctctgggaacatccttcaaaggaaaatatgggtgtgtagactactgggtgaaggcttttcttgaccgcccgagccagccaactcaagagacaaagaaaaactttgaagtagtggatctggtggatgtcaatacccctgatttaatggcacctgtgtctgctaaaaaagaaaagaaagtttcctgcatgttcattcctgatgggcgggtgtctgtctctgctcgaattgacagaaaaggattctgtgaaggtgatgagatttccatccatgctgactttgagaatacatgttcccgaattgtggtccccaaagctgccattgtggcccgccacacttaccttgccaatggccagaccaaggtgctgactcagaagttgtcatcagtcagaggcaatcatattatctcagggacatgcgcatcatggcgtggcaagagccttcgggttcagaagatcaggccttctatcctgggctgcaacatccttcgagttgaatattccttactgatctatgttagcgttcctggatccaagaaggtcatccttgacctgcccctggtaattggcagcagatcaggtctaagcagcagaacatccagcatggccagccgaaccagctctgagatgagttgggtagatctgaacatccctgataccccagaagctcctccctgctatatggatgtcattcctgaagatcaccgattggagagcccaacaactcctctgctagatgacatggatggctctcaagacagccctatctttatgtatgcccctgagttcaagttcatgccaccaccgacttatactgaggtggatccctgcatcctcaacaacaatgtgcagtgagcatgtggaagaaaagaagcagctttacctacttgtttctttttgtctctcttcctggacactcactttttcagagactcaacagtctcgtcaatggagtgtgggtccaccttagcctctgacttcctaatgtaggaggtggtcagcaggcaatctcctgggccttaaaggatgcggactcatcctcagccagcgcccatgttgtgatacaggggtgtttgttggatgggtttaaaaataactagaaaaactcaggcccatccattttctcagatctccttgaaaattgaggccttttcgatagtttcgggtcaggtaaaaatggcctcctggcgtaagcttttcaaggttttttggaggctttttgtaaattgtgataggaactttggaccttgaacttacgtatcatgtggagaagagccaatttaacaaactaggaagatgaaaagggaaattgtggccaaaactttgggaaaaggaggttcttaaaatcagtgtttcccctttgtgcacttgtagaaaaaaaagaaaaaccttctagagctgatttgatggacaatggagagagctttccctgtgattataaaaaaggaagctagctgctctacggtcatctttgcttagagtatactttaacctggcttttaaagcagtagtaactgccccaccaaaggtcttaaaagccatttttggagcctattgcactgtgttctcctactgcaaatattttcatatgggaggatggttttctcttcatgtaagtccttggaattgattctaaggtgatgttcttagcactttaattcctgtcaaattttttgttctccccttctgccatcttaaatgtaagctgaaactggtctactgtgtctctagggttaagccaaaagacaaaaaaaattttactacttttgagattgccccaatgtacagaattatataattctaacgcttaaatcatgtgaaagggttgctgctgtcagccttgcccactgtgacttcaaacccaaggaggaactcttgatcaagatgcccaaccctgtgatcagaacctccaaatactgccatgagaaactagagggcaggtgttcataaaagccctttgaacccccttcctgccctgtgttaggagatagggatattggcccctcactgcagctgccagcacttggtcagtcactctcagccatagcactttgttcactgtcctgtgtcagagcactgagctccacccttttctgagagttattacagccagaaagtgtgggctgaagatggttggtttcatgtgggggtattatgtaccc

SEQ ID NO: 66 - DNA, 401 bp, Homo sapiens
ttccattaaaaaaactttattttcattttttacaaagaatatccccatctgggtaaaaatatatctggttaagtacaaaatatagtctttaccatacaaaaagatacataatacaaaaacatgaaaccaaccatcttcagcccacactttctggctgtaataactctcagaaaagggtggagctcagtgctctgacacaggacagtgaacaaagtgctatggctgagagtgactgaccaagtgctggcagctgcagtgaggggccaatatccctatctcctaacacagggcaggaagggggttcaaagggcttttatgaagacctgccctctagtttctcatggcagtatttggaggttctgatcacagggttgggcatcttgatcaagagttcctccttg

SEQ ID NO: 67 - DNA, 513 bp, Homo sapiens
  misc_feature (1)..(513): "n" is an unknown nucleotide.
aattcggaacgaggcaacagtctctgcaatggagtgtgggtccaccttagcctctgacttcctaatgtaggaggtggtcagcaggcaatctcctgggccttaaaggatgcggactcatcctcagccagcgcccatgttgtgatacaggggtgtttgttggatgggtttaaaaataactagaaaaactcaggcccatccattttctcagatctccttgaaaattgaggccttttcgatagtttcgggtcaggtaaaaatggcctcctggcgtaanttttcaaggttttttggaggctttttgtaaattgtgataggaactttggaccttgaacttacgtatcatgtggagaagagccaatttaacaaactaggaagatgaaaagggaaattgtggccaaantttgggaaaaggaggtnttaaaanagtgttnccctttgtcacttgtagaaaaaaaagaaaactntagantgatttgatggcaatggagaancttcctgtgattataaaaagga

SEQ ID NO: 68 - DNA, 491 bp, Homo sapiens
tttgagatgggttctcactatatgtgtccaggctagagtgcagtggctattcacagatgcgaacatagtacactgcagcctccaactcctagcctcaagtgatcctcctgtctcaacctcccaagtaggattacaagcatgcgccgacgatgcccagaatccagaactttgtctatcactctccccaacaacctagatgtgaaaacagaataaacttcacccagaaaacactttgtcctgctgtcaatcatgtttgcagtgagaagcccaaaacaatctggctctggcctgcaccatccacacacccccattcccattttcccctcgagtcaaccacagctcctggaacacaaccagttgattttgtttctgggccttagcacatgttggtctctacctggatgccttcagaagctcatctgcctgaaaaactcccttccatccttccagactcagttcagacatcccctcctctggactcctgcctagca

SEQ ID NO: 69 - DNA, 423 bp, Homo sapiens
gccctcgaaaagctgctgttacgcccagtccccagagcgaagggctggcctttattctccatctgagggtgatcactagcgcttcttgagagaacggagacctggcttctccatctctgcctaatcagagaagtacctggaagcttctctcagtgagaacaaactgagttctgcctccccaagcaccctgtggaatcgagcctgtccatttatacaggaggacctgctaggcaggagtccagaggaggggatgtctgaactgagtctggaaggatggaagggagtttttcaggcagatgagcttctgaaggcatccaggtagagaccaacatgtgctaaggcccagaaacaaaatcaactggttgtgttccaggagctgtggttgactcgaggggaaaatgggaatgggggtgtgtggatggt

SEQ ID NO: 70 - DNA, 996 bp, Homo sapiens
gtggaattcatggcatctacttcgtatgactattgcagagtgcccatggaagacggggataagcgctgtaagcttctgctggggataggaattctggtgctcctgatcatcgtgattctgggggtgcccttgattatcttcaccatcaaggccaacagcgaggcctgccgggacggccttcgggcagtgatggagtgtcgcaatgtcacccatctcctgcaacaagagctgaccgaggcccagaagggctttcaggatgtggaggcccaggccgccacctgcaaccacactgtgatggccctaatggcttccctggatgcagagaaggcccaaggacaaaagaaagtggaggagcttgagggagagatcactacattaaaccataagcttcaggacgcgtctgcagaggtggagcgactgagaagagaaaaccaggtcttaagcgtgagaatcgcggacaagaagtactaccccagctcccaggactccagctccgctgcggcgccccagctgctgattgtgctgctgggcctcagcgctctgctgcagtgagatcccaggaagctggcacatcttggaaggtccgtcctgctcggcttttcgcttgaacattcccttgatctcatcagttctgagcgggtcatggggcaacacggttagcggggagagcacggggtagccggagaagggcctctggagcaggtctggaggggccatggggcagtcctgggtgtggggacacagtcgggttgacccagggctgtctccctccagagcctccctccggacaatgagtcccccctcttgtctcccaccctgagattgggcatggggtgcggtgtggggggcatgtgctgcctgttgttatgggttttttttgcggggggggttgcttttttctggggtctttgagctccaaaaaataaacacttcctttgagggagagcaaaaaaaaaaaaaaaaaaaaaaaaaaaaaaaaaaaagaattccaccaca

SEQ ID NO: 71 - DNA, 271 bp, Homo sapiens
tgctctccctcaaaggaagtgtttattttttggagctcaaagaccccagaaaaaagcaaccccccccgcaaaaaaaacccataacaacaggcagcacatgccccccacaccgcaccccatgcccaatctcagggtgggagacaagaggggggactcattgtccggagagaggctctggagggagacagccctgtgtcaacccgactgtgtccccacacccaggacttccccatggcccctccagacctgctccagaggcccttctccggct

SEQ ID NO: 72 - DNA, 476 bp, Homo sapiens
tcactacattaaaccataagcttcaggacgcgtctgcagaggtggagcgactgagaagagaaaaccaggtcttaagcgtgagaatcgcggacaagaagtactaccccagctcccaggactccagctccgctgcggcgccccagctgctgattgtgctgctgggcctcagcgctctgctgcagtgagatcccaggaagctggcacatcttggaaggtccgtcctgctcggcttttcgcttgaacattcccttgatctcatcagttctgagcgggtcatggggcaacacggttagcggggagagcacggggtagccggagaagggcctctggagcaggtctggaggggccatggggaagtcctgggtgtggggacacagtcgggttgacccagggctgtctccctccagagcctccctccggacaatgagtcccccctcttgtctcccaccctgagattgggcatggggtgcggtgtg

SEQ ID NO: 73 - DNA, 420 bp, Homo sapiens
ttttttttaaagaaacacacacacatttattttaaaatttgacataatccttgggtaattattagcatttttcagaagtttccgagactgatatctcaactccaaaccaatagcaatagcttatttgattggtggaaggattagagagggtcccatgatccagatgaatagatggctatcaaagaagacagaaccccatagacacaggcagcattaactcataatttttaaattaactgtcacaaatatgaaacatctcaccagaccaatgataacgtccatatcataatttgcattttaccaaagtgtccacatagacagcacagaactaaaagttctgtagacttcagaatcatatttaaattaatttgatcctttatattaataataattaaaaactagattctacccagtgtcgtc

SEQ ID NO: 74 - DNA, 12010 bp, Homo sapiens
  misc_feature (1)..(12010): "n" is an unknown nucleotide.
ctggaggaggacaaagggatgggggagtatcccccactcctcctacctcctggggtgacctgccttccttgtctttagacccgccctcgtctccaaggcaactcagcctttcctcagtccctcagaggcagccaccttctggaagtgggaactggggggactggatgtctgggtctcaggaaggcagagcagggataactgggcccaagatgccctgaacctgataagaggtggcagtcgagtccctcaggactccagggcctggagacttcagtacagggctctgagaccagtacaggttaggatagcttttcctgcagcaggggaggggagagtagttacttgggtttgtaaggagatgccatttagaatagttttatgtggggtaagcttcctgggcctgaggaacagagtagggattttcaaactttaatgggcacaggtcacctgggaattgtgttaaaaggcagatttggattgaacaggtcaagggtgagcctgagattctgatttcttccatgcttccaggtattgctgatggtccagggaccaccctgggcctagagggctatagggggacagtaagactagaaggtgctggggtcccctctgcccttctcttagaattctggactcctatgtgggagggcaacagggtgagctggtccaggcttatctgatgtttaattctatcatatcctcaacaaggaattgcccaacctttcctgggacatatttattttttaaaagtccaaatgattttcatattcttttacatatcttatgattttacataaatgcatttatgttacaagatttagaaaaatagtacaatcaacctgtctttttaaatttgcttttcttttgccccgttcatgttaactcttgttatattgtatgctattgttatattctattatatattctctccttctagacgtacacacaggtatatatacaaacatgggtgcttgtttattctattttcaaaaggtgggagattttttatacttctgttgcttgcttttcatattcaacagatatacatggaaatcacacaaagttaggaatatattgcctctttgttacttttcatagctgcatagtagtcaataaaccttattttttttaattccagcctgtcccctgtgggcattcacatatcttacagatttatgtcttacaaaaggtaccataataaacatctttgaaatcttcttttttatttttatttttcactttttttaaaagagatggggtctcactatgttcaccaggctggtctctaactcctggcctcaagtgatcctcccatctcggcctcccaaagtgctggggttacaggcatgagccaccagacccagacctgcacatatgttcttacttcctggtgcttctctctcgagggaatgctgggtcgaagaggatgtgcatttttaattataatagacattgctagattgctttccaaatagaagataacactcatttctgccattgagcatggtgcctcccttttcatcactttctaccacttttatatgttacagccttaaaaaaatatcttgtcagtctgcttggtatttccctgaggctagtgaatttgaccattaaaaaaaatgtttgttggcaatttggctttgcttttctgtgaaatgactatccacattctttggctgtttctttattgggttacttatatattttttcttgtcagttcctaaggggccttagtttattgtagttattaaaccttttcctgttgtatgtgttataaacattttttgcacacttgttgtttgttctaagccgttgtttatggggatattttgcccattcctgattggggaaatggggctttaggaagttatttaactgatctctgccctagtttcttcatgtgttaaatatggatagtaatagtatctaccttatgaagtgactgtgaagataaaattatggattctgtttaagggtttaggccagtgtctggcacaggggaagcattctaaaaatatagctgatgctgttaaacaatgactgttgttgttgttttactgttattatccccaaagcggcccattctgtctgttgctgtcagctatgactcagtcccctgattaacttacgcaccacccattttatcccctgcagagatgctgcccccacccccttaggcccgagggatcaggagctatgggaccagaggccctgtcatctttactgctgctgctcttggtggcaagtggagatgctgacatgaagggacattttgatcctgccaagtgtcgctatgccctgggcatgcaggaccggaccatcccagacagtgacatctctgcttccagctcctggtcagattccactgccgcccgccacagcaggtacttggcacacctggcacacttgtagctgccccgagaggagctcctgggacctctacttcccctccaacccctctgcccacgccagtgaaacccctgcaggctgagggggcaaatgaagtggggtttaaatactggagatggaggcagacctggggccagatgttctctgtgcccctcttcaccctcaggttggagagcagtgacggggatggggcctggtgccccgcagggtcggtgtttcccaaggaggaggagtacttgcaggtggatctacaacgagtgcacctggtggctctggtgggcacccagggacggcatgccgggggcctgggcaaggagttctcccggagctaccggctgcgttactcccgggatggtcgccgctggatgggctggaaggaccgctggggtcaggaggtgatctcaggcaatgaggaccctgagggagtggtgctgaaggaccttgggccccccatggttgcccgactggttcgcttctacccccgggctgaccgggtcatgagtgtctgtctgcgggtagagctctatggctgcctctggaggggtgagtggctcagcttcctgggaatctgtttcctgagcaggggactggagggtggggagtgtggcgaatggacattttaggatcccttctcctggtgggaagctgtcactctgaggagggggctagccagcattgtctcctccatgccaatgagccagtggagagatacaagaagggacctgaaacctgcccaggcctgatgaagggatgggggatggagtcttagtgcctctgacccccaccctcttattttttcccagatggactcctgtcttacaccgcccctgtggggcagacaatgtatttatctgaggccgtgtacctcaacgactccacctatgacggacataccgtggggggtaagaaaggcccctgcaggatatggagtttggggtgggagggaggactctgtgtgtgtgtgtgtgtgtgtgtgtctgtgtgtgtgtgagtgtgtgtgtgtaggggggctggtaagtagggtggggagtgagatggaagagcagagaagagggatgggtaaggtgggncctcaaagggtaacactagggtgaccactagcccgtatgacactggatgtagaagagtcacccctttgctaacacacattgttggaaattgctccaataaatatacacatcatagattgaaatggtgccccttagaggtggtgcctttgtgctggatgtgacctgcaaggtacctgtagtgctggggtggggtggagagaggagaagggccagctgcatgagtgtgaggcgggatgggaatgggactagtggatgggagccaggctggccatgccactgtgccggagggtggcggagcagaatgcctggatgtcaagaccctcttcccttccaacctcctcttccttggtcccctcttctccggactgcagtatgggggtctgggccagctggcagatggtgtggtggggctggatgactttaggaagagtcaggagctgcgggtctggccaggctatgactatgtgggatggagcaaccacagcttctccagtggctatgtggagatggagtttgagtttgaccggctgagggccttccaggctatgcaggtgagtgagtccggctctcgaggagggctctgaagccatgcagggtgccgttggggtgcccccaccactcctagccttgaccctgtgccctcttcccttccccccaggtccactgtaacaacatgcacacgctgggagcccgtctgcctggcggggtggaatgtcgcttccggcgtggccctgccatggcctgggagggggagcccatgcgccacaacctagggggcaacctgggggaccccagagcccgggctgtctcagtgccccttggcggccgtgtggctcgctttctgcagtgccgcttcctctttgcggggccctggttactcttcagcgaaatctccttcatctctggtaagccctggagtagcccagtctccagtccctgaaattgacaactgagttcattcctaaccctgcagtgtccctaaaatactcattcctcgcattatatctacccatcacccaccgaaacttctcaattaggggtgccccaaataacttgagcccctctctgcctcttgttctctgcgtatccatctttcctttgtaagccccttgcccgtgactattattgagccagtatgacagtactggttgttaaaatattgaaatacttctgtattagttgagaaatagcctcttctctaagcctccagatacctgtcctccacctccccacaatccagcaactatagggttaacacccaccacagctgggtgttccaggaccctgctcccccagcccccactggtcagtggttgcctattgagaatcacccatgcttctgctcctttgcacaacagtccactgcctctgcctcccttgggtctcctcctcatttacctccctcctttctttttgttccttctccccagatgtggtgaacaattcctctccggcactgggaggcaccttcccgccagccccctggtggccgcctggcccacctcccaccaacttcagcagcttgggtgagcaatcttgggtgggcgtgtggaccctctgcacccttctccctgggcctccccctcggctagggtgggaccctcctgtggtgctgaccctgctgcctccaccagagctggagcccagaggccagcagcccgtggccaaggccgaggggagcccgaccgccatcctcatcggctgcctggtggccatcatcctgctcctgctgctcatcattgccctcatgctctggcggctgcactggcgcaggctcctcagcaaggtgggcacagccgtggcatgtggagtggcggggggaggccaggccccagcacgagccagcgtccagtgggacctgcagggcacagcccactagcatcccaagaggagggcttagtaaagagaccacttacaccatgtcaaagagggtatggggctcacagggagggctgctccccagctctgggtctgctcagcggagaggagcaaataccacgacccagaggagagagtctgtggagagggcaccttgacaggggcagtagactttggtcctgggatgcagctggtcccgttatctacccctcagggagggcctgggagagtagatgccctgacctcacttttctgtgccaaactcctgctgggctcctctctggctaaacccaaaccaggcctgttgttgcagtgtacactggtcacccttggggcagaagcagggtagagacaggcagagagtggggttggaggggcaaagggaagacgtctgncacaccccaagccacgtcttccggctggagtccagtggcagtaatatacattaaggttgatgactggacacggtggctcatgcctgtaatcctagcactttgggagaccgaggcgggaggatcacctgaggtcaagagttcgagaccagcctgaccaacatggtgaaatcccatctctactaagaataccaaattagccaggcatggtggctgatgcctgtaatcccagctactcaggaggctgaggcatgaatctcttgaacctgggaggcgaaggttgcagtgagctgagatcatgccatttcacttcagcctgggcgacaagagccaaattccatctccaaaaaacaaacaaaccaaaaaaaacggttgatagttatggactgggcagatgagggttagaatctcattgtggggcagggaagttacctccatgctcttgagcttcactttctctgcctgtaagatggtgctgatagtatccacagctgtagggctcttgtgagggctgagggagggaacgcagggatggacacagcagagggccaggccgtgtgtgctgagcaacacgggtgatgcctcccatccctatgacaaggctgaacggagggtgttggaagaggagctgacggttcacctctctgtccctggggacactatcctcatcaacaaccgcccaggtcctagagagccacccccgtaccaggagccccggcctcgtgggaatccgccccactccgctccctgtgtccccaatggctctggtaagacctgccttgttccagtcgcacctctgtcctctctgctgttttcttattgtatccctttcccattctctttttttcctgtcttccccagtttccacttgttttcttctttctgtgcccctggttactgtctatatcactctttggtccctaccatgtagtctctctcaagagttccccatgtattacccatagtcccccgtggtgctatcttgtctgtgtcccacagacatctctctatctttgttgtaccctctcattgtgtctccctggcccctttgatttgtattagactcaccatgtttggttccttcatctatcctccatcacccatccttccatccatagtcatacatccttgcatccatccatcaatcttccatcatctgtctttctatctatattcataaatctattcatccatccatccacccacccatatccatcatccatctatccatctatattcacacatccatctttccatctgttatccatccatccaacaaacatctgtttaccatccatccatctattcatacgtcccatctgtccatgcattcattatccagccagccgtccgtcactctgcagatccttgttttatcctgtctgtctcttaatgcaatcatcccatcagccctggtcttgccctattcaaggtctccctgtctgtctagccttgagtctcatcccttccccgtgtttcccctcctccttctcccgacagcgttgctgctctccaatccagcctaccgcctccttctggccacttacgcccgtccccctcgaggcccgggcccccccacacccgcctgggccaaacccaccaacacccagggtaagcccctctgcccctgggctccgccaggctccccatacctctactggggcagggaaaagccctcacaccttgcacttcctcctctccccactgtggcctattctgctctcctgagctcccaaggaggaagctcttgtgcccttagctcatctctgctgctgcttgctcttttttaaggtcccccccttgagctgaggagtagaaagcttactggtccccagctcttctccctcctcctcttccacgccatctcttcagctctccagagctagacaggaggttgctgtggtggccccagactatagtaactcctcctttattctccactctctctagagctgcgaggaggagggctctcaccccgggcgcttgccctttccctcacatgtgtcctctctctgcagtcccagaggtgaaggctcatgccccaaccctttccatctgcccctcttctcctcagtgttgccttctcattgtggccccttccccagggctaagaggggacagctctgcttcctctcctgtctgtagacaacttgtgttggggctgtgagcagctgttaccctccctcctctctgtgtgcctctgtctctgcttgttgttgagcttggtgtgttgggttgaaagggttgggagggcttggccccagggggagccaggctgaaagccacgggagagcagctaagtgaaggggagggagctgtggtgaacgggacaagggtttggaaggtggagggtgcctggatgctgggaccatcctgaggcgggagaattcctggggaggaattcttcttccagccaagatttatctcacagtctcttgagagaccctagggaggccctaaaagagtaagactttatgacagttttgctcaaccatattcattgccttgaaaagctctggaatagctaactctcgtcccatgccagtgtcttcctggtttgaggttggcgcatggaatactgggaagatacagcatagacccagtctctcactcaaccgggagacacagggccctccgggaggctgaggtgtggggaactatagctcttgggctgttcctgatgcctcgtcctgtcttctttcccctcacccctgcagcctacagtggggactatatggagcctgagaagccaggcgccccgcttctgcccccacctccccagaacagcgtcccccattatgccgaggctgacattgttaccctgcagggcgtcaccgggggcaacacctatgctgtgcctgcactgcccccaggggcagtcggggatgggccccccagagtggatttccctcgatctcgactccgcttcaaggagaagcttggcgagggccagtttggggaggtaaggagggtgcctacccagtgtctggccctattgtgtgctctgatgccatgcctgcgcatccccctagccaggaaccttagtcatttgtaaccgtgttaatccgtttgaccctgtgaccgcctagcaaacgaacttctttctccaggtgcacctgtgtgaggtcgacagccctcaagatctggttagtcttgatttcccccttaatgtgcgtaagggacaccctttgctggtagctgtcaagatcttacggccagatgccaccaagaatgccaggtgaggaccagggatggcatctggaagaagggaggggaggccgcgaagagtggcgagccatctagagagaacaatggcagagcccaacagaggggtggtatctctgggaggggatttacatgtacgctgggggtggggacgcctggtctgcctgaggtggcgcaggggggtggnggcgctgcggaaggtgtaggccgnccactcggcattcctcttcagcttctcctttgttctccaggaatgatttcctgaaagaggtgaagatcatgtcgaggctcaaggacccaaacatcattcggctgctgggcgtgtgtgtgcaggacgaccccctctgcatgattactgactacatggagaacggcgacctcaaccagttcctcagtgcccaccagctggaggacaaggcagccgagggggcccctggggacgggcaggctgcgcaggggcccaccatcaggtacctgtttacccaggctgggccatgctcagaattcccccaggggatctcctcctctcccctcgcttcagcctgggggaaaagaggggagcgtgggggtgggaagggagagaggttccaggagggcctgggataaggaatgtgtgacaagttaacccaggaatatggacagaaaggctggaggtgactatgcaagagtggtgaagggacttgggccctgccatgacgtcccttctgctttctctcaccctcactcccctctgagtccagattggggagcacaataaaagaagagccccctagtgttggccaggcctgggagattgagagagaagtgacccttggcctcacgtgggcattccacctccacatggggagccagagtgaccgggcccggggagtgggctctctctcctctcctggatgggaatctgcgaagctgcccccagtgaccttctgtcggttcccttctcagctacccaatgctgctgcatgtggcagcccagatcgcctccggcatgcgctatctggccacactcaactttgtacatcgggacctggccacgcggaactgcctagttggggaaaatttcaccatcaaaatcgcagactttggcatgagccggaacctctatgctggggactattaccgtgtgcagggccgggcagtgctgcccatccgctggatggcctgggagtgcatcctcatggtgagcagcccgaggacagccaggttggagcagggcaggtgggagaacactggccgccactcacagccctggtctccatcagtcacacactttctctgggttgcatttacagaatctcatctataatatgaggttctcctagcccaagggactggggaaagcaggagccgcagtgtgatgggcaagaatccaggagccaagagtgggtactggggatggagacagcgtggcagagagctcaagagatgaggttgggggaggaagctggagatagaaggggttgggtagggagaccgaaggtcaggaccagaaagtgggggttgggtggagaggaaggaggagcagaaggaagaggttggtccagggccccctggagagaggaaccagattcatggagacgganaagccagagccccaagggagaggagttggnaaaaggtgcccaccggaggagagtggagagcctgncntcaggagggatcagncctgagtggagcccagagtggatctggggcttccaataggaagggaggggggtcaaccgttgcctgatgtcccctgtctgtttttgctgccttcctctgcatcccaggggaagttcacgactgcgagtgacgtgtgggcctttggtgtgaccgtgtgggaggtgctgatgctctgtagggcccagccctttgggcagctcaccgacgagcaggtcatcgagaacgcgggggagttcttccgggaccagggccggcaggtcagagtggaggagagggaagatgggtccgagncgggggacagaaggggcagagttttcatcttggagactaaagaataattgttccctgactctcaaccacacttccncaatncaggtgtacctgtcccggccgcctgcctgcccgcagggcctatatgagctgatgcttcggtgctggagccgggagtctgagcagcgaccacccttttcccagctgcatcggttcctggcagaggatgcactcaacacggtgtgaatcacacatccagctgcccctccctcagggagcgatccaggggaagccagtgacactaaaacaagaggacacaatggcacctctgccccttcccctcccgacagcccatcacctctaatagaggcagtgagactgcaggctgggcccacccagggagctgatgccccttctccccttcctggacacactctcatgtccccttcctgttcttccttcctagaagcccctgtcgcccacccagctggtcctgtggatgggatcctctccacccacctctagccatcccttggggaagggtggggagaaatataggatagacactggacatggcccattggagcacctgggccccactggacaacactgattcctggacaggtggctgcgcccccagcttctctctccctgtcacacactggaccccactggctgagaatctgggggtgaggaggacaagaaggagaggaaaatgtttccttgtgcctgctcctgtacttgtcctcagcttgggcttcttcctcctccatcacctgaaacactggacctgggggtagccccgccccagccctcagtcaccccccacttcccacctgcagtcttgtagctagaacttctctaagcctatacgtttctgtggagtaaatattgggattggggggaaagagggagcaacggcccatagccttggggttggacatctctagtgtagctgccacattgatttttctataatcacttgggtttgtacatttttggggggagagacacagatttttacactaatatatggacctagcttgaggcaattttaatcccctgcactaggcaggtaataataaaggttgagttttccac

SEQ ID NO: 75 - DNA, 495 bp, Homo sapiens
  misc_feature (1)..(495): "n" is an unknown nucleotide.
tattattacctgcctagtgcaggggnattaaaattgcctcaagctaggtccatatattagtgtaaaaatctgtgtctctccccccaaaaatgtacaaaccccaagtgattatagaaaaatcaatgtggcagctacactagagatgtccaaccccaaggctatgggccgttgctccctctttccccccaatcccaatatttactccacagaaacgtataggcttagagaagttctagctacaagactgcaagtggggaagtgggggtgactgagggctggggcggggctacccccagggtccagtgtttcagggtgatgggagggagggaaggaagcccaagctgagggacaagtacagggagcagggcacaagggaaacattttcctctccttcttgtttttncctcacccccaggtttttcaggccattgggggtccagttttttgacaggggagagagnagtttgggggcgccacctnttccgggggttcagt

SEQ ID NO: 76 - DNA, 418 bp, Homo sapiens
  misc_feature (1)..(418): "n" is an unknown nucleotide.
caggtgggctgggcacangnggnagctgatgccccttctccccttcctggacacactctcatgtccccttcctgttcttccttcctagaagcccctgtcgcccacccagctggtcctgtggatgggatcctctccaccctcctctagccatcccttggggaagggtggggagaaatataggatagacactggacatggcccattggagcacctggggccccactggacaacactgattcctgggagaggtggctgcgccccagcttctctctccctgtcacacactggaccccactggctgagaatctgggggtgaggaagacaagaaggagaggaaaatgttttccttgttgcctgctcctgttanttgttcctcagtttggggttttttccttcttccntcaacttgaaacattgg

SEQ ID NO: 77 - DNA, 643 bp, Homo sapiens
taaagaaggaagaggtttttatttggccggtagcattggcagactcatgtcttaagagccaagctcccccaaaaagaaattcctagcccttttaaggcgttacaactctaaggggtccacgtgaaagggtcatgatagatcaagtaagcatgaggaatgtgactggaggctacatatatcagctaacagaacaaaaagttttacagtgctttctcatacaatgtctggaatttacagatagtaccagtagtttttatcggtaataagaaaaaggatggcttaatagtgccaataacacaactgtctgcccattcattaggtaactgaatgtaggctctctgcccacatatccagtatagtccagcgagagccatccagtcctgatgagatcctggacaagcccccattatatcaggagctggatcagtgggcaccaactctcaggcttcccaaggccatcggtctctgatagtggttccccgcatatataacaagaagtaacattaagggaatgagctacattttctgctaattggagaaacaaattttttatctttttcagaagttctggtgctggcagatttaactcctcataaaaggtttgaaacactggtttgggagagttgctgtgggacctcccctt

SEQ ID NO: 78 - DNA, 455 bp, Homo sapiens
  misc_feature (1)..(455): "n" is an unknown nucleotide.
gcaagatatcgagcttatgacatttaatttgganaacaccgcggctctaagcgaagatctttataaattcttgattcttactaaaagatnaaataaggcaacgaatcaatgcaagaaaannagcaagggnnagaggagcttctgctaaagaattacctccaaagccattgtcaagnccacagcagtcatctgcaccagtccagctgaactctggctctcaaagcaatttgaatcaacccatagnagtgacagcgctgtattcatttgaaggacagcagctgggggatttgaattttcaagctgggagacagaatcacagttatatccaaaaacagattcacatttttgattnggtgggggagggaacttcgaggtcaactggcatttttccagccactncggtaccntggatttaagcgttactnttttcttctttgngggtttccaaaaaattt

SEQ ID NO: 79 - DNA, 394 bp, Homo sapiens
  misc_feature (1)..(394): "n" is an unknown nucleotide.
ctaccatgtcaccgtaagtttatgctactgctgggaaatgaacaaatgtagccccataaggaagaaaagttgagagatgccatatgtttaaagacatggtagtcagacttctttgtaatcacatttctatggataaatgncatagtataatttttgaaggtataaggacaatttctaagggtttatattctagttaatacctacaactctaaacattacttaataccncatttaggctggtttctttttctccggtcactttggcaanggggangtaggtttggaatttgtgggctctacccacagggttncccaatttaaaacacggctaccctatacngggcccgntccaanggctgggcctgtttggaggngttccccgggggacctgggg

SEQ ID NO: 80 - DNA, 522 bp, Homo sapiens
ttgggaagtcaggatttattaagaacatcgggatcccagatatttctttttttaccatataccttaacatttgggggattttgattcccacaaaaacctctatcatttaaaaccagatattcgaattacaaggctaacatttttagctaatcaactcttcagtgctgatcccagaaaatagcctccaatgggtctttgagtcatggaaatggacaactttcagccattgacatgagtggtgtcggtggtcacacctttaacattcaagccacaagctctaaagtctggaaagggtgaggtctactgtcctgcattgtcgccatctgctgtcgtattttcagtgctaatggactgtacgttgtctgcaaggttgtgtgcatgctcaagaaacaaatctttgagtacacttaattccttggtcagcaatttgatttttgcttccaaccgttcattctcttctttgagctgattgactctctgcagtgtgtcttgtgctttctgcttgcttttcaaccggctctt

SEQ ID NO: 81 - DNA, 573 bp, Homo sapiens
gttcaggatccccgctatctcagggctctctgggccagtcctcctgggagcccccaccacaacacttcccaggcatgagctctcaggcgccacatgagcttccacacactgagaagtgtccgagaaattggtggggcctctgaaggacgtgtgagcagccacctgaactcccagctcaccagcccaaacagggtgcaggggctctggcctgaagaacctgagtggagtggaatggcactggctggccactcagctcagcgggcgacgtgcccctacaagttggcagaagtggctgccactgctgggtttgtgtaagagaggctgctgcaccattacctgcagaaaccttctcataggggctacgatcggtactgctagggggcacatagcggccatgggtgtggtaggtggggtactcgctcataggatggtaagtatcccgggctggaaagatgtccagctgcccgtaattctttccgcggcacttacagacaggcaaggcaatgagatagacaatggccagcgcaccaggacaaagaccagcaccaacagcgcatggccccagcctggacc

SEQ ID NO: 82 - DNA, 608 bp, Homo sapiens
ctcgatataacctgacgattcacgtcagcgtgagtgatgtgccatttctttctctgcccagtctgggtggggtgccagctggggcatcgcgctgctggtgctggtctgtgttctggttgcgctggcattgtcatccattgccttgctgtctgtcagtgccgccgaaagaactacgggcagctggacatctttccagcccgggatacctaccatcctatgagcgagtaccccacctaccacacccatgggcgctatgtgcccctagcagtaccgatcgtagcccctatgagaaggtttctgcaggtaatggtggcagcagcctctcttacacaaacccagcagtggcagccacttctgccaacttgtatgggcacgtcgccggctgagctgagtgggcagcccagtgcatttcattccactcaggttcttcaggggcagagccctgcaccctgtttgggctggtgagctgggagttcaggtgggctgctcacagctccttcagaggccccacaatttctcgacacttctcatgtgtggaagccatgtgggccctgaaggccatgctgggaagtgttgtggtggggttccaggggactggccagaagccc

SEQ ID NO: 83 - DNA, 299 bp, Homo sapiens
  misc_feature (1)..(299): "n" is an unknown nucleotide.
cactttcacatacattgttatgaatcattggntttcctctnnnttccacttatcaccaatttatttcattcagccagatttggngtcttcattttgtagaacggtgtaagtggnttccattccagcatgaatgtggtcggtcacatggcagtggagtaaccaaattccaggngttcttggaaacatttctagggtttggtatgttccagggaaaatgtcaaagacatcagaactataaactcccctgtgcttgtattgggaaggctatggccgtgaaaaatgtacagngtgtaaggnct

SEQ ID NO: 84 - DNA, 404 bp, Homo sapiens
  misc_feature (1)..(404): "n" is an unknown nucleotide.
gctgaagaagagcatcttggcatcctgggtcctgtcatttgggcagaggtgggagacaccatcagagtaaccttccataacaaaggagcatatcccctcagtattgagccgattggggtgagattcaataagaacaacgagggcacatactattccccaaattacaacccccagagcagaagtgtgcctccttcagcctcccatgtggcacccacagaaacattcacctatgaatggactgtccccaaagaagtaggacccactaatgcagatcctgtgtgtctagctaagatgtattattctgctgtggatcccactnaaaggatatatttcactgggctttattggggccaatggaaaatattncaaggaaaggnaagttttacatngcaaatggggtggac

SEQ ID NO: 85 - DNA, 342 bp, Homo sapiens
aactccatctttgagaaacatttaataatgtaatgtgtttgtggtacagggtgagtacagatgcacaggaggccatagggtttaggcaaaggggagcacaaaagttgaagatgaggcgctgccatcaaagctgtggggcttcaggccaagaacaggagctgaggaagccacaagggaggacattttctgcagttgctgaaccagtagcaaccaggtcctgagaaagccctctcttgtggaagaataacagccaggagggaaagcttttcatcctgcaaagctggggcagaaagttcttctttgaatgtgtcatctgcacttcagctcaggaatcctcttggc

SEQ ID NO: 86 - DNA, 381 bp, Homo sapiens
ctacttcaggaatcagaaaggacactctggacttcagccaagaggattcctgagctgaagtgcagatgacacattcaaagaagaactttctgccccagctttgcaggatgaaaagctttccctcctggctgttattcttccacaagagagggctttctcaggacctggttgctactggttcagcaactgcagaaaatgtcctcccttgtggcttcctcagctcctgttcttggcctgaagccccacagctttgatggcagcgctcatcttcaacttttgtgctcccctttgcctaaaccctatggcctcctgtgcatctgtactcaccctgtaccacaaacacattacattattaaatgtttctcaaagatggagttaaaa

SEQ ID NO: 87 - DNA, 383 bp, Homo sapiens
  misc_feature (1)..(383): "n" is an unknown nucleotide.
ttcagaaaaatttaataacgtagtgcatttgtggcacacagggggagtacagatgcatgggaggccgtaggttaggtaaaggggagcactaaagttgaagatgaggcactgccatcaatgctgggacttcaggccaaggnatggagctgaggaagccacaaggatggacattttctgcagagttgctgaaccggtagcaaccagggcctgagaaagtcctctcttgtggaagaataagagccaagcaggaaaagcttttcatcatgcaaagctggggcagaaggttcccccttgaatgtnggtcatctgcacttcagctcacgagtcctgttgggtgaagtccagagtgccctttctgattcttgaagtagatgaatagcccg

SEQ ID NO: 88 - DNA, 428 bp, Homo sapiens
  misc_feature (1)..(428): "n" is an unknown nucleotide.
tgagtggagtcgggggctttgtgctgncgcctgctcttccttggggccgggctattcatctacttcaagaatcanaaagggcactctggacttcacccaacaggactcgtganctgaagtgcagatgaccacattcaagggggaaccttctgcccnagctttgcatgatnaaaagctttcctgcttggctcttattcttccacaagagaggactttctcaggccctggttgctaccggttcagcaactctgcanaaaatgtccatcnttgtggcttcntcagntcctgcccttgncctgaagtcccancacttgantgggcacgtgcgtcantnttcaactttagtgctcccntttacctaaccctanngcntcccatgcatctgtactccncctgtgtgncacaaatgcactacgttatnaaatttt

SEQ ID NO: 89 - DNA, 1304 bp, Homo sapiens
ttcccagatgcacaggaggagaagcaggagctgtcgggaagatcagaagccagtcatggatgaccagcgcgaccttatctccaacaatgagcaactgcccatgctgggccggcgccctggggccccggagagcaagtgcagccgcggagccctgtacacaggcttttccatcctggtgactctgctcctcgctggccaggccaccaccgcctacttcctgtaccagcagcagggccggctggacaaactgacagtcacctcccagaacctgcagctggagaacctgcgcatgaagcttcccaagcctcccaagcctgtgagcaagatgcgcatggccaccccgctgctgatgcaggcgctgcccatgggagccctgccccaggggcccatgcagaatgccaccaagtatggcaacatgacagaggaccatgtgatgcacctgctccagaatgctgaccccctgaaggtgtacccgccactgaaggggagcttcccggagaacctgagacaccttaagaacaccatggagaccatagactggaaggtctttgagagctggatgcaccattggctcctgtttgaaatgagcaggcactccttggagcaaaagcccactgacgctccaccgaaagagtcactggaactggaggacccgtcttctgggctgggtgtgaccaagcaggatctgggcccagtccccatgtgagagcagcagaggcggtcttcaacatcctgccagccccacacagctacagctttcttgctcccttcagcccccagcccctcccccatgtcccaccctgtacctcatcccatgagacctggtgcctggctctttcgtcacccttgtacaagacaaaccaagtcggaacagcagataacaatgcagcaaggccctgctgcccaatctccatctgtcaacaggggcgtgaggtcccaggaagtggccaaaagctagacagatccccgttcctgacatcacagcagcctccaacacaaggctccaagacctaggctcatggacgagatgggaaggcacagggagaagggataaccctacacccagaccccaggctggacatgctgactgtcctctcccctccagcctttggccttggcttttctagcctatttacctgcaggctgagccactctcttccctttccccagcatcactccccaaggaagagccaatgttttggacccataatcctttctgccgacccctagttccctctgctcagccaagcttgttatcagctttcagggccatggttcacattagaataaaaggtagtaattag

SEQ ID NO: 90 - DNA, 458 bp, Homo sapiens
ctaattactaccttttattctaatgtgaaccatggccctgaaagctgataacaagcttggctgagcagagggaactaggggtcggcagaaaggattatgggtggaaaacattggctcttccttggggagtgatgctggggaaagggaagagagtggctcagctgcaggtaaataggctagaaaagccaaggccaaaggtggccggggagaggacagtcagcatgtccagcctggggtctgggtgtagggttatcccttctccctgtgccttcccatctcgtccatgagcctaggtcttggagccttgtgttggaggctgctgtgatgtcaggaacggggatctgtctagcttttggccacttcctgggacctcacgcccctgttgacagatggagattgggcagcagggccttgctgcattgctatctgctgttccgacttggtttgtcttgtccaag

SEQ ID NO: 91 - DNA, 623 bp, Homo sapiens
gctgcccatgggagccctgccccaggggccatgcagaatgcaccaagtatggcaacatgacagaggaccatgtgatgcacctgctccagaatgctgaccccctgaaggtgtacccgccactgaaggggagcttcccggagaacctgagacaccttaagaacaccatggagaccatagactggaaggtctttgagagctggatgcaccattggctcctgtttgaaatgagcaggcactccttggagcaaaagcccactgacgctccaccgaaagagtcactggaactggaggacccgtcttctgggctgggtgtgaccaagcaggatctgggcccagtccccatgtgagagcagcagaggcggtcttcaacaatcctgcaagccccacacagctacagctttcttgctcccttcagcccccagcccctcccccatctcccaccctgtacctcatcccatgagaccctggtgcctggctctttcgtcacccttggacaagacaaaccaagtcggaacagcagatagcaatgcagcaaggccctgctgcccaatctccatctgtcaacaggggcgtgaggtcccaggaagtggccaaaagctagacagatccccgttcctgacatc

SEQ ID NO: 92 - DNA, 573 bp, Homo sapiens
  misc_feature (1)..(573): "n" is an unknown nucleotide.
aaagctgataacaagcttggctgagcagagggaactaggggtcggcagaaaggattatgggtggaaaacattggctcttccttggggagtgatgctggggaaagggaagagagtggctcagctgcaggtaaataggctagaaaagccaaggccaaagctgngaggggagaggacagtcagcatgtccagcctggggtctgggtgtagggttatcccttctccctgtgccttcccatctcgtccatgagcctaggtcttggagccttgtgttggaggctgctgtgatgtcaggaacggggatctgtctagcttttggccacttcctgggacctcacgcccctgttgacagatggagattgggcagcagggccttgctngcattgttatctgctgttccgacttggtttgtcttgtccaagggtgacgatagagccatgcatccaggtctcatgggatgaggtacagggtgggagatgggggaggggctgggggctgaagggagcaagaaagctgtaactgtgtggggctggcaggatgttgaagaccgctctgctgctctcacatggggactgg

SEQ ID NO: 93 - DNA, 674 bp, Homo sapiens
tgatgcacctgctccagaatgctgaccccctgaaggtgtacccgccactgaaggggagcttcccggagaacctgagacaccttaagaacaccatggagaccatagactggaaggtctttgagagctggatgcaccattggctcctgtttgaaatgagcaggcactccttggagcaaaagcccactgacgctccaccgaaagagtcactggaactggaggacccgtcttctgggctgggtgtgaccaagcaggatctgggcccagtccccatgtgagagcagcagaggcggtcttcaacatcctgccagccccacacagctacagctttcttgctcccttcagcccccagcccctcccccatctcccaccctgtacctcatcccatgagaccctggtgcctggctctttcgtcacccttggacaagacaaaccaagtcggaacagcagataacaatgcagcaaggccctgctgcccaatctccatctgtcaacaggggcgtgaggtcgcaggaagtgggcaaagctagacagatgcccggttctgacatcacagcagcttcaacacaaggctccaagactaggctcatggacgagatgggaaggcacagggagaaggataacctacacccagactccagctggacatgctgactgttctctcgctccagctttgg

SEQ ID NO: 94 - DNA, 1183 bp, Homo sapiens
  misc_feature (1)..(1183): "n" is an unknown nucleotide.
cgcccaagaagaaaatggccataagtggagtccctgtgctaggatttttcatcatagctgtgctgatgagcgctcaggaatcatgggctatcaaagaagaacatgtgatcatccaggccgagttctatctgaatcctgaccaatcaggcgagtttatgtttgactttgatggtgatgagattttccatgtggatatggcaaagaaggagacggtctggcggcttgaagaatttggacgatttgccagctttgaggctcaaggtgcattggccaacatagctgtggacaaagccaacttggaaatcatgacaaagcgctccaactatactccgatcaccaatgtacctccagaggtaactgtgctcacgaacagccctgtggaactgagagagcccaacgtcctcatctgtttcatcgacaagttcaccccaccagtggtcaatgtcacgtggcttcgaaatggaaaacctgtcaccacaggagtgtcagagacagtcttcctgcccagggaagaccaccttttccgcaagttccactatctccccttcctgccctcaactgaggacgtttacgactgcagggtggagcactggggcttggatgagcctcttctcaagcactgggagtttgatgctccaagccctctcccagagactacagagaacgtggtgtgtgccctgggcctgactgtgggtctggtgggcatcattattgggaccatcttcatcatcaagggagtgcgcaaaagcaatgcagcagaacgcagggggcctctgtaaggcacatggaggtgatgatgtttcttagagagaagatcactgaagaaacttctgctttaatgactttacaaagctggcaatattacaatccttgacctcagtgaaagcagtcatcttcagcgttttccagccctatagccaccccaagtgtggttatgcctcctcgattgctccgtactctaacatctagctggcttccctgtctattgccttttcctgtatctattttcctctatttcctatcattttattatcaccatgcaatgcctctggaataaaacatacaggagtctgtctctgctatggaatgccccatggggcatctcttgtgtacttattgtttaaggtttcctcaaactgngattcttctgaacacaataaactattttgatgatcttgggtgg

SEQ ID NO: 95 - DNA, 396 bp, Homo sapiens
  misc_feature (1)..(396): "n" is an unknown nucleotide.
tttttncanccaagatcatcaaaatagtttattgtgttcagaaaaatcacagtttgaggaaaccttaaacaataagtacacaagagatgccccatggntntcccatagcagagacagactcctgtatgttttattccagaggcattgcatggtgataataaaatgataggaaatagaggaaaatagatacaggaaaaggcantagacagggaagccagctagatnttagagtacggagcantcgaggaggcataaccacacttggggtggctatagggctggaaaacgctgaagatgactgctttcactgaggtcaaggnttgtaatattgccnagctttgtaaagtcatttaaagcagaagtttctttccagtgatccttctctcctaagggnac

SEQ ID NO: 96 - DNA, 411 bp, Homo sapiens
  misc_feature (1)..(411): "n" is an unknown nucleotide.
ccagaggtaactgtgctcacgaacagccctgtggaactgagagagcccaacgtcctcatctgtttcatcgacaagttcaccccaccagtggtcaatgtcacgtggcttcgaaatggaaaacctgtcaccacaggagtgtcagagacagtcttcctgcccagggaagaccaccttttccgcaagttccactatctccccttcctgccctcaactgagggacgtttacgacttgcagggtgggagcactggggcttgggatgagccttttcttcaaggcactggggagttttgatggttccaagccctttcccaggagattacagaggaacgtggtgttgttgccnggggccttgnattgtggggtcttggtngggcntcattanttggggaccntctttcatcatcaagggg

SEQ ID NO: 97 - DNA, 1048 bp, Homo sapiens
aggagctggggccatcaaggcggaccatgtgtcaacttatgccgcgtttgtacagacgcatagaccaacaggggagtttatgtttgaatttgatgaagatgagatgttctatgtggatctggacaagaaggagaccgtctggcatctggaggagtttggccaagccttttcctttgaggctcagggcgggctggctaacattgctatattgaacaacaacttgaataccttgatccagcgttccaaccacactcaggccaccaacgatccccctgaggtgaccgtgtttcccaaggagcctgtggagctgggccagcccaacaccctcatctgccacattgacaagttcttcccaccagtgctcaacgtcacgtggctgtgcaacggggagctggtcactgagggtgtcgctgagagcctcttcctgcccagaacagattacagcttccacaagttccattacctgacctttgtgccctcagcagaggacttctatgactgcagggtggagcactggggcttggaccagccgctcctcaagcactgggaggcccaagagccaatccagatgcctgagacaacggagactgtgctctgtgccctgggcctggtgctgggcctagtcggcttcatcgtgggcaccgtcctcatcataaagtctctgcgttctggccatgacccccgggcccaggggaccctgtgaaatactgtaaaggtgacaaaatatctgaacagaagaggacttaggagagatctgaactccagctgccctacaaactccatctcagcttttcttctcacttcatgtgaaaactactccagtggctgactgaattgctgacccttcaagctctgtccttatccattacctcaaagcagtcattccttagtaaagtttccaacaaatagaaattaatgacactttggtagcactaatatggagattatcctttcattgagccttttatcctctgttctcctttgaagagcccctcactgtcaccttcccgagaataccctaagaccaataaatacttcagtatttcag

SEQ ID NO: 98 - DNA, 385 bp, Homo sapiens
  misc_feature (1)..(385): "n" is an unknown nucleotide.
anttatgaaatactgaagtatttattggncttagggtattctcgggaaggtgacagtgaggggttcttcaaaggagaacagaggataaaaggctcaatgaaaggataatctccatattagtgctaccaaagtgtcattaattnctatttgttggaaactttactaaggaatgactgctttgagggtaatgggataaggacagagcttgaagggtcagccaattcagtcagccactgggagtaggttttcacatgaaggtgaggaaggaaaagctgaggatgggagtttgtaggggcagctgggagttcagatctctccctaaggtcccncttcctgttcaggatattttgtcaccnttacaggtatttcacagggtccccngggg

SEQ ID NO: 99 - DNA, 390 bp, Homo sapiens
  misc_feature (1)..(390): "n" is an unknown nucleotide.
ttcggcacagggcgggctggctaacattgctatattgaacnncaacttgaataccttgatccagcgttccaaccacactcaggccaccaacgatccccctgaggtgaccgtgtttcccaaggagcctgtggagctgggccagcccaacaccctcatctgccacattgacaagttcttcccaccagtgctcaacgtcacgtgggctgtgcaacggggagctggtcactgagggtgtcgctgagagcctcttcctgcccagaacagattacagcttccacaagttccattacctgacctttgtgccctcagcagaggacttctatgantgcagggtnggagcatggggggtttggaccagccgcttctcaagcattgggagggccaaggagc

SEQ ID NO: 100 - DNA, 307 bp, Homo sapiens
tttttttttccatctttgagttatattttataatgtaatgtgtttgtcgtacagggtgagtacagatgcactgtaggccatacggttttggcaaaggggagcacaaaagttgaagatgaggcgctgtcatcaatgctgggacttcaggccaagggcaggagctgaggaagccactagggaggacattttctgcagttgccgaaccagtagcaaccaggtcctgagaaagccctctcttgtggaagaataactgccaagcaggaaagcttttcattctgcaaagctgggacagaaggttcttccttga

SEQ ID NO: 101 - DNA, 1158 bp, Homo sapiens
cttgcctgcttctctggcccctggtcctgtcctgttctccagcatggtgtgtctgaagctccctggaggctcctgcatgacagcgctgacagtgacactgatggtgctgagctccccactggctttgtctggggacacccgaccacgtttcctgtggcagcctaagagggagtgtcatttcttcaatgggacggagcgggtgcggttcctggacagatacttctataaccaggaggagtccgtgcgcttcgacagcgacgtgggggagttccgggcggtgacggagctggggcggcctgacgctgagtactggaacagccagaaggacatcctggagcaggcgcgggccgcggtggacacctactgcagacacaactacggggttgtggagagcttcacagtgcagcggcgagtccaacctaaggtgactgtatatccttcaaagacccagcccctgcagcaccacaacctcctggtctgctctgtgagtggtttctatccaggcagcattgaagtcaggtggttcctgaacggccaggaagagaaggctgggatggtgtccacaggcctgatccagaatggagactggaccttccagaccctggtgatgctggaaacagttcctcgaagtggagaggtttacacctgccaagtggagcacccaagcgtgacaagccctctcacagtggaatggagagcacggtctgaatctgcacagagcaagatgctgagtggagtcgggggctttgtgctgggcctgctcttccttggggccgggctgttcatctacttcaggaatcagaaaggacactctggacttcagccaacaggattcctgagctgaaatgcagatgaccacattcaaggaagaactttctgccccggctttgcaggatgaaagctttcctgcttggcagttattcttccacaagagagggctttctcaggacctggttgctactggttcggcaactgcagaaaatgtcctcccttgtggcttcctcagctcctgcccttggcctgaagtcccagcattgatggcagcgcctcatcttcaacttttgtgctcccctttgcctaaaccgtatggcctcccgtgcatctgtattcaccctgtatgacaaacacattacattattaaatgtttctcaaagatgg

SEQ ID NO: 102 - DNA, 505 bp, Homo sapiens
  misc_feature (1)..(505): "n" is an unknown nucleotide.
ccatctttgagaaacatttaataatgtaatgtgtttgtcgtacagggtgagtacagatgcacgggaggccatacggtttaggcaaaggggagcacaaaagttgaagatgaggcgctgtcatcaatgctgggacttcaggccaaggnaggagctgaggaagccacaagggaggacattttctgcagttgccgaaccagtagcaaccaggtcctgagaaagccctctcttgtggaagaataactgccaagcaggaaagcttttcattctgcaaagctgggacagaaggttcttccttgaatgtggtcatctgcatttcagctcaggaatcctgttggctgaagtccagagtgtcctttctgattcctgaagtagatgaacagcccggccccaaggaagagcaggcccagcacgaagcccccgactccactcagcatcttgctctgtgcagattcagaccgtgctctccattccactgtgagagggctcgtcacacttgggtgctcca

SEQ ID NO: 103 - DNA, 428 bp, Homo sapiens
  misc_feature (1)..(428): "n" is an unknown nucleotide.
gttcatagttctccctgagtgagacttgcctgcttctctggcccctggtactgtcctgttctccagcatggtgtgtctgaagctccctggaggctcctgcatgacagcgctgacagtgacactgatggtgctgagctccccactggctttggctggggacacccgaccacgtttcttgtggcagcttaagtttgaatgtcatttcttcaatgggacggagcgggtgcggttgctggaaagatgcatctataaccaagaggagtccgtgcgcttcgacagcgacgtgggggagtaccgggcggtgacggagcntggggcggcctgatgccgagtacttggaacagccagaaggacctcctggaagcagaggcgggccgcgggtggacacctacttgcagacacaacttacggggttggtgagagcttca

SEQ ID NO: 104 - DNA, 1042 bp, Homo sapiens
tttcctcactgactataaaagaatagagaaggaagggcttcagtgaccggctgcctggctgacttacagcagtcagactctgacaggatcatggctatgatggaggtccaggggggacccagcctgggacagacctgcgtgctgatcgtgatcttcacagtgctcctgcagtctctctgtgtggctgtaacttacgtgtactttaccaacgagctgaagcagatgcaggacaagtactccaaaagtggcattgcttgtttcttaaaagaagatgacagttattgggaccccaatgacgaagagagtatgaacagcccctgctggcaagtcaagtggcaactccgtcagctcgttagaaagatgattttgagaacctctgaggaaaccatttctacagttcaagaaaagcaacaaaatatttctcccctagtgagagaaagaggtcctcagagagtagcagctcacataactgggaccagaggaagaagcaacacattgtcttctccaaactccaagaatgaaaaggctctgggccgcaaaataaactcctgggaatcatcaaggagtgggcattcattcctgagcaacttgcacttgaggaatggtgaactggtcatccatgaaaaagggttttactacatctattcccaaacatactttcgatttcaggaggaaataaaagaaaacacaaagaacgacaaacaaatggtccaatatatttacaaatacacaagttatcctgaccctatattgttgatgaaaagtgctagaaatagttgttggtctaaagatgcagaatatggactctattccatctatcaagggggaatatttgagcttaaggaaaatgacagaatttttgtttctgtaacaaatgagcacttgatagacatggaccatgaagccagttttttcggggcctttttagttggctaactgacctggaaagaaaaagcaataacctcaaagtgactattcagttttcaggatgatacactatgaagatgtttcaaaaaatctgaccaaaacaaacaaacagaaa

SEQ ID NO: 105 - DNA, 380 bp, Homo sapiens
  misc_feature (1)..(380): "n" is an unknown nucleotide.
gtggctgctctactcagattgcatagaggtttttttgttttctgttttctgtttgtttgttttggtcagattttttgaaacatcttcatagtgtatcatcctgaaaactgaatagtcactttgaggttattgcttttnctttccaggncagttagccaactaaaaaggccccaaaaaaactggcttcatggtccatgtctatcaagtgctcatttgttacagaaacaaaaattctgtcattttccttaagctcaaatattcccccttgatagatggantagagtccatattctgcatctttagaccaacaactatttctaggcacttttcatcaacaatataggggtcagggatancttgtgtatttgtaaatatattgg

SEQ ID NO: 106 - DNA, 487 bp, Homo sapiens
  misc_feature (1)..(487): "n" is an unknown nucleotide.
agcagtcagacttctgacaggatcatggctatgatggaggtccaggggggaccacgcctgggacagacctgcgtgctgatcgtgatcttcacagtgctcctgcagtctctctgtgtggctgtaacttacgtgtactttaccaacgagctgaagcagatgcaggacaagtactccaaaagtggcattgcttgtttcttaaaagaagatgacagttattgggaccccaatgacgaagagagtatgaacagcccctgctggcaagtcaagtggcaactccgtcagctcgttagaaagatgattttgagaacctctgaggaaaccattttctacagttcaagaaaagcaacaaaatatttctcccctagtnagagaaagaggtcctcagagagtaggcagcttcacataactnggganccgtngggaggnaggcacacattgtctttttccaacttccaggattgaaaagggttttngggccccaaattaa

SEQ ID NO: 107 - DNA, 1666 bp, Homo sapiens
acgcgtccgaaagcggccatgttttacatatttcttgattttgtttgttttctcgtgagcttaggccgctggttttggtgatttttgtctgattgcaatgtctggacgtggtaagcaaggaggcaaagctcgcgccaaagcgaaatcccgctcttctcgcgctggtctccagttcccggtgggccgagtgcaccgcctgctccgtaaaggcaactacgcagagcgggttggggcaggcgcgccggtgtacctggcggcggtgttagagtacctgaccgccgagatcctggagctggccggcaacgcggctcgcgacaacaagaagactcgcatcatcccgcgccacttgcagctggccatccgcaacgacgaggagctcaacaaactgctaggccgggtgaccattgctcagggcggcgtccttcctaacatccaggccgtgcttctgcctaagaagaccgagagtcaccacaaggccaagggcaagtgatttgacaggtatctgagctcccggaaacgctatcaaacccaaaggctcttttcagagcccccctaccgtttcaaaggaagagctaacctcactgcttgtaggtagaaggaaaaaagcactaaggttgcaaaagcttctcatttcagagagatgccaggatcctaagtgcctgccaaacttaccaattctaaggaataagtggatggatggcattactgattcctacattactgattgattctgcatccacaaattgttttattaaaaacattctacatcatgtgtggggagataaggaggataaaatgaagagaaagaatattattgaggggaagttcttctgaatacaaaatgtgtttaattttttaaataagtattacattcacagggttcaaactatttgaagtaaagagattatataaagaatccatccctcaacttacccaggtggtcacttttctttttcttgtgtatctgcccagtattcattcctgctgatatcagtcaataatgaatgatacgtgttttcttcacttttttcattcttgtcaggtagcagactgtgtagacttttctgcacttgcccttttcataacaatctatcttggagaactttccctatgagaacatacagagcttcctgtacacagttgcatgtactgcattatgcaaatgcattatattttatgtaacctgtccactgttggtaggcacttgagttgttttagtcttttgctatcaaacagttctgggatgattaaccctgatttactgcaaaattgaaattgctctgctattctgctggaatggtggtaagtgaactgaaaattccagtcactcttgggctagactcaacgttcttaaaaactatgtggccatcaccaaattagttattttgaaccttaatttcttcacctctaaaatggaggtaatacttaccttaagtggctatgagaatgaagatcatgtgtatgaattgttggtgctctaaagaacagcacaaataaaattattttcaaatttaattttaattgaactatgtgtaatttcttaattttgaaataattttatttgtaatgtgcataatcttatttaatgtataatgtatacattgtaatagaaacagatttcccaaattccagcctggcatgaggtaataaaaggtaatgcaaaaaa

SEQ ID NO: 108 - DNA, 393 bp, Homo sapiens
  misc_feature (1)..(393): "n" is an unknown nucleotide.
aaatttgaaaataattttatttgtgctgttctttagagcaccaacaattcatacacatgatcttcattctcatagccacttaaggtaagtattacctccattttagaggtgaagaaattaaggttcaaaataactaatttggtgatcggccacatagtttttaagaacgttgagtctagcccaagagtgactggaattttcagttcacttaccaccattccagcagaatagcagagaatttcaattttgcagtaaatcagggttaatcatcccagaactgtttgatagcaaaagactaaaacaactcaagtngcctaccaacagtggacaggttacataaaatataatggcatttgcataatgcagtacatgcaactgtgtacagggaaaagg

SEQ ID NO: 109 - DNA, 364 bp, Homo sapiens
  misc_feature (1)..(364): "n" is an unknown nucleotide.
tgacaggtatctgagctcccggaaacgctataaacccaaaggctcttttcagagccccctaccgtttcaaaggaagagctaacctcactgcttgtaggtagaaggaaaaaaggcactaagaaaatgtcttctgaggctgatctggtgtctcacatctgtaatcccagcacttggggaggctgaggttgcaaaagcttctcatttcagagagatgccaggatcctaagtgcctgccaaacttaccaatttctaaggaataacgtggatggatggcattactganttcctacattactgattgattctgcaatccgcaaatttgntttatttnaaaancaattctacatccatgttgtgggngagg

SEQ ID NO: 110 - DNA, 445 bp, Homo sapiens
  misc_feature (1)..(445): "n" is an unknown nucleotide.
ttctggttgtcaatgaggatatttattggggtttcatgagtgcagggagaagggctggatgacttgggatggggagagagacccctcccctgggatccctgcagctccagggtnccgtgggtngggttagagttgggaacctatgaacattctntaggggccactntcttctccacggtgctcccttcatgcgtgacctggcanctntagcttctgtgggacttccactgctcgggcgtcaggctcaggtagctgctggccgcgtacttnttgttgctctgtttggagggtttggtggtctccactcccnccttnacggggctgccatctgccttccagggcactntcacagctcccgggtagaagtcactgatcagacacactagtgtggccttgttggcttggagctcctcagagganggcgggaacagagttacagtgggga

SEQ ID NO: 111 - DNA, 121 bp, Homo sapiens
  misc_feature (1)..(121): "n" is an unknown nucleotide.
ctacctgagcctgacgnccgagcagtngaagtcccacagaagctacagctnccaggtcacgcatnaagggagcaccgtngagaagacagtngcccctacagaatgttcataggttcccaac

SEQ ID NO: 112 - DNA, 1244 bp, Homo sapiens
atggaagccccagctcagcttctcttcctcctgctactctggctcccagataccaccggagaaattgtgttgacacagtctccagccaccctgtctttgtctccaggggaaagagccaccctctcctgcagggccagtcagagtgttggcagctacttagcctggtaccaacagaaacctggccaggctcccaggcccctcatctatgatgcatccaacagggccactggcatcccagccaggttcagtggcagtgggtctgggacagacttcactctcaccatcagcagcctagagcctgaagattttgcagtttattactgtcaacaccgtgacaattggcctccgggggccactttcggcggagggaccaaggtggagatcaaacataccaccggagaaattgtgttgacacagtctccagccaccctgtctttgtctccaggggaaagagccaccctctcctgcagggccagtcagagtgttggcagctacttagcctggtaccaacagaaacctggccaggctcccaggcccctcatctatgatgcatccaacagggccactggcatcccagccaggttcagtggcagtgggtctgggacagacttcactctcaccatcagcagcctagagcctgaagattttgcagtttattactgtcaacaccgtgacaattggcctccgggggccactttcggcggagggaccaaggtggagatcaaacgaactgtggctgcaccatctgtcttcatcttcccgccatctgatgagcagttgaaatctggaactgcctctgttgtgtgcctgctgaataacttctatcccagagaggccaaagtacagtggaaggtggataacgccctccaatcgggtaactcccaggagagtgtcacagagcaggacagcaaggacagcacctacagcctcagcagcaccctgacgctgagcaaagcagactacgagaaacacaaagtctacgcctgcgaagtcacccatcagggcctgagctcgcccgtcacaaagagcttcaacaggggagagtgttagagggagaagtgcccccacctgctcctcagttccagcctgaccccctcccatcctttggcctctgaccctttttccacaggggacctacccctattgcggtcctccagctcatctttcacctcacccccctcctcctccttggctttaattatgctaatgttggaggagaatgaataaataaagtgaatctttgc

SEQ ID NO: 113 - DNA, 521 bp, Homo sapiens
  misc_feature (1)..(521): "n" is an unknown nucleotide.
aacantagcataattaaagccaaggaggaggaggggggtgaggtgaaagatgagctggaggaccgcaataggggtaggncccctgtggaaaaagggtcagaggccaaaggatgggagggggtcaggctggaactgaggagcagatgggggcacttctccctctaacantctcccctgttgaagctctttgtgacgggcgagctcaggccctgatgggtgacttcgcaggcgtagactttgtgtttctcgtagtctgctttgctcagcgtcagggtgctgctgaggctntaggtgctgtccttgctgtcctgctctgtgacantctccngggganttacccgattgganggcgttatccaccttccactgtaantttggcccnctgggatagaagttattcagcaggcacacaacagaggcagttccagattttcaaantgctcancagatggccggaagctncgtgccnaattttttgggcntcgagggcaaaatccccataagngagtcgnattaaattc

SEQ ID NO: 114 - DNA, 520 bp, Homo sapiens
  misc_feature (1)..(520): "n" is an unknown nucleotide.
cttcccgccatctgatgagcagttgaaatctggaactgcctctgttgtgtgcctgctgaataacttctatcccagagaggccaaagtacagtggaaggtggataacgccctccaatcgggtaactcccaggagagtgtcacagagcaggacagcaaggacagcacctacagcctcagcagcaccctgacgctgagcaaagcagactacgagaaacacaaagtctacgcctgcgaagtcacccatcagggcctgagctcgcccgtcacaaagagcttcaacaggggagagtgttagagggagaagtgcccccatctgctcctcagttccagccttgaccccctcccatcctttgggccttttgacccttttttccacagggggaccttacccctatttgcggtncttccaggttcatcttttcaacttnaacccccttcttncttcttgggttttatttattgttaatgtttggaggaggattgattaaattaagtgaatttttttgcanctgttaaaaaa

SEQ ID NO: 115 - DNA, 388 bp, Homo sapiens
aaagattcactttatttattcattctcctccaacattagcataattaaagccaaggtggaggaggggggtgaggtgaaagatgagctggaggaccgcaataggggtaggtcccctgtggaaaaagggtcagaggccaaaggatgggagggggtcaggctggaactgaggagcaggtgggggcacttgtgcgactaacactctcccctgttgaagctctttgtgacgggcgagctcaggccctgatgggtggacttcgcaggcgtagactttgtgtttctcgtagtctgctttgctcagcgtcagggtgctgctgaggctgtaggtgctgcccttgcggtccggccctgtgacactctcctgggagttacccgattggagggcgttatc

SEQ ID NO: 116 - DNA, 290 bp, Homo sapiens
gcagactacgagaaacacaaagtctacgcctgcgaagtcacccatcagggcctgagctcgcccgtcacaaagagcttcaacaggggagagtgttagagggagaagtgcccccacctgctcctcagttccagcctgaccccctcccatcctttggcctctgaccctttttccacaggggacctacccctattgcggtcctccagctcatctttcagctcacccccctcctcctccttggctttaattatgctaatgttggaggagaatgaataaataaagtgaatctttgc

SEQ ID NO: 117 - DNA, 2897 bp, Homo sapiens
cgcagctcagcctgggcggcacagccagatgcgagatgcgtctctgctgatctgagtctgcctgcagcatggacctgggtcttccctgaagcatctccagggctggagggacgactgccatgcaccgagggctcatccatccacagagcagggcagtgggaggagacgccatgacccccatcctcacggtcctgatctgtctcgggctgagtctgggccccaggacccacgtgcaggcagggcacctccccaagcccaccctctgggctgaaccaggctctgtgatcacccaggggagtcctgtgaccctcaggtgtcaggggggccaggagacccaggagtaccgtctatatagagaaaagaaaacagcactctggattacacggatcccacaggagcttgtgaagaagggccagttccccatcccatccatcacctgggaacatgcagggcggtatcgctgttactatggtagcgacactgcaggccgctcagagagcagtgaccccctggagctggtggtgacaggagcctacatcaaacccaccctctcagcccagcccagccccgtggtgaactcaggagggaatgtaatcctccagtgtgactcacaggtggcatttgatggcttcagtctgtgtaaggaaggagaagatgaacacccacaatgcctgaactcccagccccatgcccgtgggtcgtcccgcgccatcttctccgtgggccccgtgagcccgagtcgcaggtggtggtacaggtgctatgcttatgactcgaactctccctatgagtggtctctacccagtgatctcctggagctcctggtcctaggtgtttctaagaagccatcactctcagtgcagccaggtcctatcgtggcccctgaggagaccctgactctgcagtgtggctctgatgctggctacaacagatttgttctgtataaggacggggaacgtgacttccttcagctcgctggcgcacagccccaggctgggctctcccaggccaacttcaccctgggccctgtgagccgctcctacgggggccagtacagatgctacggtgcacacaacctctcctccgagtggtcggcccccagtgaccccctggacatcctgatcgcaggacagttctatgacagagtctccctctcggtgcagccgggccccacggtggcctcaggagagaacgtgaccctgctgtgtcagtcacagggatggatgcaaactttccttctgaccaaggagggggcagctgatgacccatggcgtctaagatcaacgtaccaatctcaaaaataccaggctgaattccccatgggtcctgtgacctcagcccatgcggggacctacaggtgctacggctcacagagctccaaaccctacctgctgactcaccccagtgaccccctggagctcgtggtctcaggaccgtctgggggccccagctccccgacaacaggccccacctccacatctggccctgaggaccagcccctcacccccaccgggtcggatccccagagtggtctgggaaggcacctgggggttgtgatcggcatcttggtggccgtcatcctactgctcctcctcctcctcctcctcttcctcatcctccgacatcgacgtcagggcaaacactggacatcgacccagagaaaggctgatttccaacatcctgcaggggctgtggggccagagcccacagacagaggcctgcagtggaggtccagcccagctgccgatgcccaggaagaaaacctctatgctgccgtgaagcacacacagcctgaggatggggtggagatggacactcggcagagcccacacgatgaagacccccaggcagtgacgtatgccgaggtgaaacactccagacctaggagagaaatggcctctcctccttccccactgtctggggaattcctggacacaaaggacagacaggcggaagaggacaggcagatggacactgaggctgctgcatctgaagccccccaggatgtgacctacgcccagctgcacagcttgaccctcagacgggaggcaactgagcctcctccatcccaggaagggccctctccagctgtgcccagcatctacgccactctggccatccactagcccagggggggacgcagaccccacactccatggagtctggaatgcatgggagctgcccccccagtggacaccattggaccccacccagcctggatctaccccaggagactctgggaacttttaggggtcactcaattctgcagtataaataactaatgtctctacaattttgaaataaagcaacagacttctcaataatcaatgaagtagctgagaaaactaagtcagaaagtgcattaaactgaatcacaatgtaaatattacacatcaagcgatgaaactggaaaactacgagccactgcgcccggccacattcagttcttatcaaagaaataacccagacttaatcttgaatgatacgattatgcccaatattaagtaaaaaatataagaaaaggttatcttaaatagatcttaggcaaaataccagctgatgaaggcatctgatgccttcatctgttcagtcatctccaaaaacagtaaaaataaccactttttgttgggcaatatgaaatttttaaaggagtagaataccaaatgatagaaacagactgcctgaattgagaattttgattttttaaagtgtgtttctttctaaattgctgttccttaatttgattaatttaattcatgtattatgattaaatctgaggcagatgagcttacaagtattgaaataattactaattaatcacaaatgtgaagttatgcatgatgtaaaaaatacaaacattctaattaaaggctttgcaacacaaaaaaaaaaaaaaa

SEQ ID NO: 118 - DNA, 545 bp, Homo sapiens
  misc_feature (1)..(545): "n" is an unknown nucleotide.
gtgttgcaaagcctttaattagaatgtttgtattttttacatcatgcataacttcacatttgtgattaattagtaattatttcaatacttgtaagctcatctgcctcagatttaatcataatacatgaattaaattaatcaaattaaggaacagcaatttagaaagaaacacactttaagaaatcaaaattctcaattcaggcagtctgtttctatcatttggtattctactcctttaaaaatttcatattgcccaacaaaaaatggttatttttactgtttttggagatgactgaacagatgaaggcatcagatgccttcatcagctgggtattttgcctaagatctatttaagataacattttcntatattttttacttaatattggggcataatcgtatcattcaagattaagtcnggggtatttccttgataagaacnggaatgtggccgggcgcagtggctcacgcctgtaatcccagcacttngggaggccgaggtgggtggatcncaaggtcaggagatcgggaccatccnggctaac

SEQ ID NO: 119 - DNA, 531 bp, Homo sapiens
  misc_feature (1)..(531): "n" is an unknown nucleotide.
gtgctaaaggagaagatagaagctgagaagggtcgtgatgccttccccgtggctggacagaaactcatctatgccggcaagatcttgagtgacgatgtccctatcagggactatcgcatcgatgagaagaactttgtggtcgtcatggtgaccaanaccnaannnnnnntnnnnaatataagaaaatgttatcttaaatagatcttaggcaaaataccagctgatgaaggcatctgatgccttcatctgttcagtcatctccaaaaacagtaaaaataaccattttttgttgggcaatatgaaatttttaaaggagtagaataccaaatgatagaaacagactgcctgaattgagaattttgattcttaaagtgtgttctttctaaattgctgttccttaatttgattaatttaatccatgtattatgattaaactgaggcagatganttccaagtattgaaataattctaattaacacaaatgtgaagttatncatgatgtaaaaatccaacatctaattaangctttna

SEQ ID NO: 120 - DNA, 1172 bp, Homo sapiens
gagacattcctcaattgcttagacatattctgagcctacagcagaggaacctccagtctcagcaccatgaatcaaactgcgattctgatttgctgccttatctttctgactctaagtggcattcaaggagtacctctctctagaaccgtacgctgtacctgcatcagcattagtaatcaacctgttaatccaaggtctttagaaaaacttgaaattattcctgcaagccaattttgtccacgtgttgagatcattgctacaatgaaaaagaagggtgagaagagatgtctgaatccagaatcgaaggccatcaagaatttactgaaagcagttagcaaggaaatgtctaaaagatctccttaaaaccagaggggagcaaaatcgatgcagtgcttccaaggatggaccacacagaggctgcctctcccatcacttccctacatggagtatatgtcaagccataattgttcttagtttgcagttacactaaaaggtgaccaatgatggtcaccaaatcagctgctactactcctgtaggaaggttaatgttcatcatcctaagctattcagtaataactctaccctggcactataatgtaagctctactgaggtgctatgttcttagtggatgttctgaccctgcttcaaatatttccctcacctttcccatcttccaagggtactaaggaatctttctgctttggggtttatcagaattctcagaatctcaaataactaaaaggtatgcaatcaaatctgctttttaaagaatgctctttacttcatggacttccactgccatcctcccaaggggcccaaattctttcagtggctacctacatacaattccaaacacatacaggaaggtagaaatatctgaaaatgtatgtgtaagtattcttatttaatgaaagactgtacaaagtataagtcttagatgtatatatttcctatattgttttcagtgtacatggaataacatgtaattaagtactatgtatcaatgagtaacaggaaaattttaaaaatacagatagatatatgctctgcatgttacataagataaatgtgctgaatggttttcaaataaaaatgaggtactctcctggaaatattaagaaagactatctaaatgttgaaagatcaaaaggttaataaagtaattataact

SEQ ID NO: 121 - DNA, 577 bp, Homo sapiens
  misc_feature (1)..(577): "n" is an unknown nucleotide.
agttataattactttattaaccttttggtctttcaacatttagatagtctttcttaatatttccaggagagtacctcatttttattttgaaaaccattcagcacatttatcttatgtaacatgcagagcatatatctatctgtatttttaaaattttcctgttactcattgatacatagtacttaattacatgttattccatgtacactgaaaacaatataggaaatatatacatctaagacttctactttgtacagtctttcattaaataagaatacttacacatacattttcagatatttctaccttcctgtatgtgtttggaattgtatgtaggtagccactgaaagaatttgggccccttgcgaggatggcagtggaagtccatgaagtaaagagcattcctttaaaagcagatttgattgcataccttttagttatttgagattctgagaattctgatnaaacccaaagcagaaagattccttaataccttgngagatgggaaagtgagggaaatatttgaagccgggtcagacatcccttaagacatagcacctcagtagggctttcatat

SEQ ID NO: 122 - DNA, 407 bp, Homo sapiens
  misc_feature (1)..(407): "n" is an unknown nucleotide.
aatcttaaatgaattatttatttatttttaaaatctgaggaataaatgcaagtttttaaaagtagcaaggacatgtaaacagaaattgcttctatatattttaatacaaaatccacatttattattagcaccaatgatttaacttacaaatatattctgactccctggttttaagagcaatagcttaagttaaatacacagttcatctcttccaaagtcaaaaacaataaaataaaataacaccgacaagcaatagtagcaatgggcaatttgaaaacatagtacctttaatgttaatgggacttcaatagctcagtacaaactatataattaatatggtagcattagatgtcagttggacttttggattcttacagtcntgttgtaatcagtttcatagacnttta

SEQ ID NO: 123 - DNA, 311 bp, Homo sapiens
aaagcatacctgagatctatgatcccacatctggaatctggaatgaaatcttccaagtccaaggatgtactttctgctgctgaagtaatgcaatggtctcaatctctggaaaaacttcttgccaaccaaactggtcaaaatgtctttggaagtttccctaaaagtctgaattcagtgaggagaatattgagttctgggctggcttgtgaagactataagaaaacagagtctgatctttttgccctgtaaagcagaagagatatataaagcatttgtgcattcagatgctgctaaacaaatcaatattggct

SEQ ID NO: 124 - DNA, 1398 bp, Homo sapiens
tagatggcaacctccctatctgcccgcaggtcatagaggcgacacgtagcgtcatctgaccctgaagcaaaggcatctccactccaaagttagacaaaatgccaggaatgttcttctctgctaacccaaaggaattgaaaggaaccactcattcacttctagacgacaaaatgcaaaaaaggaggccaaagacttttggaatggatatgaaagcatacctgagatctatgatcccacatctggaatctggaatgaaatcttccaagtccaaggatgtactttctgctgctgaagtaatgcaatggtctcaatctctggaaaaacttcttgccaaccaaactggtcaaaatgtctttggaagtttcctaaagtctgaattcagtgaggagaatattgagttctggctggcttgtgaagactataagaaaacagagtctgatcttttgccctgtaaagcagaagagatatataaagcatttgtgcattcagatgctgctaaacaaatcaatattgacttccgcactcgagaatctacagccaagaagattaaagcaccaacccccacgtgttttgatgaagcacaaaaagtcatatatactcttatggaaaaggactcttatcccaggttcctcaaatcagatatttacttaaatcttctaaatgacctgcaggctaatagcctaaagtgactggtccctggctgaagggaattaacagatagtatcaaggcacgaaggaatgtgccagtatggctccctgggtgaacagcttggccttttttgggtgtcttgacaggccaagaagaacaaatgactcagaatggattaacatgaaagttatccaggcgcagagttgaagaagcataagcaagacaaaaacagagagaccgcagaaggaggaagatactgtggtactgtcataaaaaacagtggagctctgtattagaaagcccctcagaactgggaaggccaggtaactctagttacacagaaactgtgactaaagtctatgaaactgattacaacaggctgtaagaatcaaagtcaactgacatctatgctacatattattatatagtttgtactgagctattgaagtcccattaacttaaagtatatgttttcaaattgccattgctactattgcttgtcggtgtattttattttattgtttttgactttggaagagatgaactgtgtatttaacttaagctattgctcttaaaaccagggatcagaatatatttgtaagttaaatcattggtgctaataataaatgtggattttgtattaaaatatatagaagcaatttctgtttacatgtccttgctacttttaaaaacttgcatttattcctcagattttaaaaataaataaataattcatttaaaaaaaaaaa

SEQ ID NO: 125 - DNA, 408 bp, Homo sapiens
aatacaaaatccacatttattattagcaccaatgatttaacttacaaatatattctgactccctggttttaagagcaatagcttaagttaaatacacagttcatctcttccaaagtcaaaaacaataaaataaaataacaccgacaagcaatagtagcaatggcaatttgaaaacatatactttaagttaatgggacttcaatagctcagtacaaactatataataatatgtagcatagatgtcagttgactttgattcttacagtctgttgtaatcagtttcatagactttagtcacagtttctttgtaactagagttacctggccttcccagttctgaggggctttctaatacagagctccactgttttttatgacagtaccacagtatcttcctccttctgcggt

SEQ ID NO: 126 - DNA, 457 bp, Homo sapiens
aagttagacaaaatgccaggaatgttcttctctgctaacccaaaggagttgaaaggaaccactcattcacttctagacgacaaaatgcaaaaaaggaggccaaagacttttggaatggatatgaaagcatacctgagatctatgatcccacatctggaatctggaatgaaatcttccaagtccaaggatgtactttctgctgctgaagtaatgcaatggtctcaatctctggaaaaacttcttgccaaccaaactggtcaaaatgtctttggaagtttcctaaagtctgaattcagtgaggagaatattgagttctggctggcttgtgaagactataagaaaacagagtctgatcttttgccctgtaaagcagaagagatatataaagcatttgtgcattcagatgctgctaaacaaatcaatattgacttccgcactcgagaatctacagccaaga

SEQ ID NO: 127 - DNA, 2828 bp, Homo sapiens
agcagccggcacggggacagccggccgcacaacggatctgcaggcgcggagcaaaatgcacccgccgcgccgcgcggtcctgcagccccgccacggccccgcggcccgcacccccccggggcgacagtgagcctctcccgccaccaccgggggccgagcggagggctctcgggtgggagagcgggaccagatctcgacagctgttcatttccaggaagccaccgcagccagagcgaaaggggaccttctgccaccagcggggcatcagccagcggcgcgcatggatttatgaagacactcatgcaagaagtgggcaggacttggacaaacttttccaccggctccgcgtccgccgctccccgcgcctcgtctcctttcccctcctctcccggcggccgccgctgcccgcgatggtggccgcgctgctgggcggcggcggcgaggcccgcggggggacagtgccgggcgcctggctgtgcctgatggcgctgctgcagctgctgggctcggcgccgcggggatcggggctggcgcacggccgccgcctcatctgctggcaggcgctgctgcagtgccagggggagccggagtgcagctacgcctacaaccagtacgccgaggcgtgcgcgccggtgctggcgcagcacggcgggggcgacgcgcccggggccgccgccgccgctttcccggcctcggccgcctctttctcgtcgcgctggcgctgcccgagtcactgcatctcggccctcattcagctcaaccacacgcgccgcgggcccgccctggaggactgtgactgcgcgcaggacgagaactgcaagtccaccaagcgcgccattgagccgtgcctgccccggacgagcggcggcggcgcgggcggccccggcgcgggcggggtcatgggctgcaccgaggcccggcggcgctgcgaccgcgacagccgctgcaacctggcgctgagccgctacctgacctactgcggcaaagtcttcaacgggctgcgctgcacggacgaatgccgcaccgtcattgaggacatgctggctatgcccaaggtggcgctgctcaacgactgcgtgtgcgacggcctcgagcggcccatctgcgagtcggtcaaggagaacatggcccgcctgtgcttcggcgccgagctgggcaacggccccggcagcagcggctcggacgggggcctggacgactactacgatgaggactacgatgacgagcagcgcaccgggggcgcgggtggtgagcagccgctggacgacgacgacggcgtcccgcacccaccgcgcccgggcagcggcgctgctgcatcgggcggccgcggggacctgccctatgggcctgggcgcaggagcagcggcggcggcggccgcttggcgccccggggcgcctggaccccactcgcctccatcttgctgctgctgcttgggccgctcttttagccctcgcgccccccgccgttggctgcgggagagcccgcgtcccactcccgtgctcgcctcgaccccgcgccgggcacctgtggcttgggacagatagaagggatggttggggatacttcccaaaactttttccaagtcaacttggtgtagccggttccccggccacgactctgggcacttcccctgaagctcctctccggagcttgacttcttggacctcctcccccgccccaattccaagctccagaaactcccaactcgtctgccgtccagaaagctagctgcagtgttcaggacgtccgggaggaagcaagcatgtgggggacagaacagtagtcctggactcgaaagggaaggtgctgaccagtggggccttagcaatttgaagggttgggaaggaggaattatatttgcaaaggggctgtctattagcatatttcctttgagggggcaaaaaaaagtgccagtatcgacttttacagattgtggccagtgaggatattataatcctatgtaaacagaaaagtcccacttaccgattcattctttcactgtttgtatctgcgcccagaattctcagtgacgtgggggtgagggtgggtggcgattgccttagagggaacccctaaattggttttggataagtttgagcccttgaccttaatttcattgctaccactctgatctcttagcacatttcttaggattaagggtccaaaaatgctgatctaaggggttgccatggtgttgaacaatgcaactttttatttaaaaaagctctgcactgccatgtatgaaagtctctttatgatgtttgtttttttgtcatttttgttctttacatcaagaaattttatgtttaaatatgcggagaatgtatattgcctctgctcctatcagggttgctaaaccctggtacatcgtatataaaatgtattaaaactggggtttgttaccagttgctgtactttgtatatagaatttttataaattgtatgcttcagaaataatttatttttaaaaagaaattaaaagttttaaactcacatccatattacacctttcccccctgaaatgtatagaatccatttgtcatcaggaatcaaaacccacagtccattgtgaagtgtgctatatttagaacagtcttaaaatgtacagtgtattttatagaattgaagttaacattcttattttcaagagaatttatggacgttgtagaaatgtacaaatgcatttccaaactgccttaaacgttgtatttttatagacatgtttttttaaaaatcctaagtttttaaataactatggatttgtgtattttttttggttatttgttttattaaaacatgtacatcagtaaagagttttaaacaatga

SEQ ID NO: 128 - DNA, 519 bp, Homo sapiens
  misc_feature (1)..(519): "n" is an unknown nucleotide.
tttcattgtttaaaactctttactgatgtacatgttttaataaaacaaataaccaaaaaaaatacacaaatccatagttatttaaaaacttaggatttttaaaaaacatgtctataaaaatacaacgtttaaggcagtttggaaatgcatttgtacatttctacaacgtccataaattctcttgaaaataagaatgttaacttcaattctataaaatacactgtacattttaagactgttctaaatatagcacacttcacaatggactgtgggttttgattcctgatgacaaatggattctatacatttcaggggggaaaggtgtaatatggatgtgagtttaaaacttttaatttctttttaaaaataaattatttctgaagcatacaatttataaaaattctatatacaaagtacagcaactgggtaacaaaccccagttttaatacnttttatatacgatgtaccagggnttagcacccnggataggagcngaggcnatatncatccccgcatatt

SEQ ID NO: 129 - DNA, 174 bp, Homo sapiens
cggcaaaaaaaagtgccagtatcgacttttacagattgtggccagtgaggatattataatcctatgtaaacagaaaagtcccacttaccgattcattctttcactgtttgtatctgcgcccagaattctcagtgacgtgggggtgagggtgggtggcgattgcttagagggaac

SEQ ID NO: 130 - DNA, 2717 bp, Homo sapiens
cagggtaacgctgtcttgtggacccgcacttcccacccgagacctctcactgagcccgagccgcgcgcgacatgagccacgggaagggaaccgacatgctcccggagatcgccgccgccgtgggcttcctctccagcctcctgaggacccggggctgcgtgagcgagcagaggcttaaggtcttcagcggggcgctccaggaggcactcacagagcactacaaacaccactggtttcccgaaaagccgtccaagggctccggctaccgctgcattcgcatcaaccacaagatggaccccatcatcagcagggtggccagccagatcggactcagccagccccagctgcaccagctgctgcccagcgagctgaccctgtgggtggacccctatgaggtgtcctaccgcattggggaggacggctccatctgcgtcttgtacgaggaggccccactggccgcctcctgtgggctcctcacctgcaagaaccaagtgctgctgggccggagcagcccctccaagaactacgtgatggcagtctccagctaggcccttccgcccccgccctgggcgccgccgtgctcatgctgccgtgacaacaggccaccacatacctcaacctggggaactgtatttttaaatgaagagctatttatatatattatttttttttaagaaaggaggaaaagaaaccaaaagttttttttaagaaaaaaaatccttcaagggagctgcttggaagtggcctccccaggtgcctttggagagaactgttgcgtgcttgagtctgtgagccagtgtctgcctataggagggggagctgttagggggtagacctagccaaggagaagtgggagacgtttggctagcaccccaggaagatgtgagagggagcaagcaaggttagcaactgtgaacagagaggtcgggatttgccctgggggaggaagagaggccaagttcagagctctctgtctcccccagccagacacctgcatccctggctcctctattactcaggggcattcatgcctggacttaaacaatactatgttatcttttcttttatttttctaatgaggtcctgggcagagagtgaaaaggcctctcctgattcctactgtcctaagctgcttttcttgaaatcatgacttgtttctaattctaccctcaggggcctgtagatgttgctttccagccaggaatctaaagctttgggttttctgagggggggaggagggaactggaggttattggggttaggatggaagggaactctgcacaaaacctttgctttgctagtgctgctttgtgtgtatgtgtggcaaataatttgggggtgatttgcaatgaaattttgggacccaaagagtatccactggggatgttttttggccaaaactcttccttttggaaccacatgaaagtcttgatgctgctgccatgatccctttgagaggtggctcaaaagctacagggaactccaggtcctttattactgccttcttttcaaaagcacaactctcctctaaccctcccctcccccttcccttctggtcgggtcatagagctaccgtattttctaggacaagagttctcagtcactgtgcaatatgccccctgggtcccaggagggtctggaggaaaactggctatcagaacctcctgatgccctggtgggcttagggaaccatctctcctgctctccttgggatgatggctggctagtcagccttgcatgtattccttggctgaatgggagagtgccccatgttctgcaagactacttggtattcttgtagggccgacactaaataaaagccaaaccttgggcactgttttttctccctggtgctcagagcacctgtgggaaaggttgctgtctgtctcagtacaatccaaatttgtcgtagacttgtgcaatatatactgttgtgggttggagaaaagtggaaagctacactgggaagaaactcccttccttcaatttctcagtgacattgatgaggggtcctcaaaagacctcgagtttcccaaaccgaatcaccttaagaaggacagggctagggcatttggccaggatggccaccctcctgctgttgccccttagtgaggaatcttcaccccacttcctctacccccaggttctcctccccacagccagtcccctttcctggatttctaaactgctcaattttgactcaaaggtgctatttaccaaacactctccctacccattcctgccagctctgcctccttttcaactctccacattttgtattgccttcccagacctgcttccagtctttattgctttaaagttcactttgggcccacagacccaagagctaattttctggtttgtgggttgaaacaaagctgtgaatcactgcaggctgtgttcttgcatcttgtctgcaaacaggtccctgcctttttagaagcagcctcatggtctcatgcttaatcttgtctctcttctcttctttatgatgttcactttaaaaacaacaaaacccctgagctggactgttgagcaggcctgtctctcctattaagtaaaaataaatagtagtagtatgtttgtaagctattctgacagaaaagacaaaggttactaattgtatgatagtgtttttatatggaagaatgtacagcttatggacaaatgtacacctttttgttactttaataaaaatgtagtaggataaaaaaaaa

SEQ ID NO: 131 - DNA, 413 bp, Homo sapiens
tatcctactacatttttattaaagtaacaaaaaggtgtacatttgtccataagctgtacattcttccatataaaaacactatcatacaattagtaacctttgtcttttctgtcagaatagcttacaaacatactactactatttatttttacttaataggagagacaggcctgctcaacagtccagctcaggggttttgttgtttttaaagtgaacatcataaagaagagaagagagacaagattaagcatgagaccatgaggctgcttctaaaaaggcagggacctgtttgcagacaagatgcaagaacacagcctgcagtgattcacagctttggtttcaacccacaaaccagaaaattagctcttgggggctgtggggcccaaagtggaacttttaaagcaataaagact

SEQ ID NO: 132 - DNA, 467 bp, Homo sapiens
  misc_feature (1)..(467): "n" is an unknown nucleotide.
ggtcctcaaaagacctcgagtttcccaaaccgaatcaccttaagaaggacagggctagggcatttggccaggatgcacnccatcctgctgttgccccttagtgaggaatcttcaccccacttcctctacccccaggttctcctccccacagccagtcccctttcctggatttctaaactgctcaattttgactcaaaggtgctatttaccaaacactctccctacccattcctgccagctctgcctccttttcaactctccacattttgtattgccttcccagacctgcttccangtctttattgctttaaacgttcactttgggcccacagacccaagaagctaattttctggtttgtgggttgaaacaaagctgtgaatcactgcaggctgtgttcttgcatcttgtctgcaaacaggtccctgcctttttagaagcagcctcatggtctcatgcttaatcttgt

SEQ ID NO: 133 - DNA, 3565 bp, Homo sapiens
gcagccgggcggccgcagaagcgcccaggcccgcgcgccacccctctggcgccaccgtggttgagcccgtgacgtttacactcattcataaaacgcttgttataaaagcagtggctgcggcgcctcgtactccaaccgcatctgcagcgagcaactgagaagccaagactgagccggcggccgcggcgcagcgaacgagcagtgaccgtgctcctacccagctctgcttcacagcgcccacctgtctccgcccctcggcccctcgcccggctttgcctaaccgccacgatgatgttctcgggcttcaacgcagactacgaggcgtcatcctcccgctgcagcagcgcgtccccggccggggatagcctctcttactaccactcacccgcagactccttctccagcatgggctcgcctgtcaacgcgcaggtaaggctggcttcccgtcgccgcggggccgggggcttggggtcgcggaggaggagacaccgggcgggacgctccagtagatgagtagggggctcccttgtgcctggagggaggctgccgtggccggagcggtgccggctcgggggctcgggacttgctctgagcgcacgcacgcttgccatagtaagaattggttcccccttcgggaggcaggttcgttctgagcaacctctggtctgcactccaggacggatctctgacattagctggagcagacgtgtcccaagcacaaactcgctaactagagcctggcttcttcggggaggtggcagaaagcggcaatcccccctcccccggcagcctggagcacggaggagggatgagggaggagggtgcagcgggcgggtgtgtaaggcagtttcattgataaaaagcgagttcattctggagactccggagcggcgcctgcgtcagcgcagacgtcagggatatttataacaaaccccctttcaagcaagtgatgctgaagggataacgggaacgcagcggcaggatggaagagacaggcactgcgctgcggaatgcctgggaggaaaagggggagacctttcatccaggatgagggacatttaagatgaaatgtccgtggcaggatcgtttctcttcactgctgcatgcggcactgggaactcgccccacctgtgtccggaacctgctcgctcacgtcggctttccccttctgttttgttctaggacttctgcacggacctggccgtctccagtgccaacttcattcccacggtcactgccatctcgaccagtccggacctgcagtggctggtgcagcccgccctcgtctcctctgtggccccatcgcagaccagagcccctcaccctttcggagtccccgccccctccgctggggcttactccagggctggcgttgtgaagaccatgacaggaggccgagcgcagagcattggcaggaggggcaaggtggaacaggtgaggaactctagcgtactcttcctgggaatgtgggggctgggtgggaagcagccccggagatgcaggagcccagtacagaggatgaagccactgatggggctggctgcacatccgtaactgggagccctggctccaagcccattccatcccaactcagactctgagtctcaccctaagaagtactctcatagtttcttccctaagtttcttaccgcatgctttcagactgggctcttctttgttctcttgctgaggatcttattttaaatgcaagtcacacctattctgcaactgcaggtcagaaatggtttcacagtggggtgccaggaagcagggaagctgcaggagccagttctactggggtgggtgaatggaggtgatggcagacacttttactgaatgtcggtctttttttgtgattattctagttatctccagaagaagaagagaaaaggagaatccgaagggaaaggaataagatggctgcagccaaatgccgcaaccggaggagggagctgactgatacactccaagcggtaggtactctgtgggttgctcctttttaaaacttaagggaaagttggagattgagcataagggcccttgagtaagactgtgtcttatgctttcctttatccctctgtatacaggagacagaccaactagaagatgagaagtctgctttgcagaccgagattgccaacctgctgaaggagaaggaaaaactagagttcatcctggcagctcaccgacctgcctgcaagatccctgatgacctgggcttcccagaagagatgtctgtggcttcccttgatctgactgggggcctgccagaggttgccaccccggagtctgaggaggccttcaccctgcctctcctcaatgaccctgagcccaagccctcagtggaacctgtcaagagcatcagcagcatggagctgaagaccgagccctttgatgacttcctgttcccagcatcatccaggcccagtggctctgagacagcccgctccgtgccagacatggacctatctgggtccttctatgcagcagactgggagcctctgcacagtggctccctggggatggggcccatggccacagagctggagcccctgtgcactccggtggtcacctgtactcccagctgcactgcttacacgtcttccttcgtcttcacctaccccgaggctgactccttccccagctgtgcagctgcccaccgcaagggcagcagcagcaatgagccttcctctgactcgctcagctcacccacgctgctggccctgtgagggggcagggaaggggaggcagccggcacccacaagtgccactgcccgagctggtgcattacagagaggagaaacacatcttccctagagggttcctgtagacctagggaggaccttatctgtgcgtgaaacacaccaggctgtgggcctcaaggacttgaaagcatccatgtgtggactcaagtccttacctcttccggagatgtagcaaaacgcatggagtgtgtattgttcccagtgacacttcagagagctggtagttagtagcatgttgagccaggcctgggtctgtgtctcttttctctttctccttagtcttctcatagcattaactaatctattgggttcattattggaattaacctggtgctggatattttcaaattgtatctagtgcagctgattttaacaataactactgtgttcctggcaatagtgtgttctgattagaaatgaccaatattatactaagaaaagatacgactttattttctggtagatagaaataaatagctatatccatgtactgtagtttttcttcaacatcaatgttcattgtaatgttactgatcatgcattgttgaggtggtctgaatgttctgacattaacagttttccatgaaaacgttttattgtgtttttaatttatttattaagatggattctcagatatttatatttttattttatttttttctaccttgaggtcttttgacatgtggaaagtgaatttgaatgaaaaatttaagcattgtttgcttattgttccaagacattgtcaataaaagcatttaagttgaatgcgaccaaccttgtgctcttttcattctggaagt

SEQ ID NO: 134 - DNA, 462 bp, Homo sapiens
cacagcgcccacctgtctccgcccctcggcccctcgcccggctttgcctaaccgccacgatgatgttctcgggcttcaacgcagactacgaggcgtcatcctcccgctgcagcagcgcgtccccggccgggactagcctctcttactaccactcacccgcagactccttctccagcatgggctcgcctgtcaacgcgcaggacttctgcacggacctggccgtctccagtgccaacttcattcccacggtcactgccatctcgaccagtccggacctgcagtggctggtgcagcccgccctcgtctcctctgtggccccatcgcagaccagagcccctcaccctttcggagtccccgccccctccgctggggcttactccagggctggcgttgtgaagaccatgacaggatggcgagcgcaaacattgggcaggaggggcaaggtggaacagttatctccag

SEQ ID NO: 135 - DNA, 494 bp, Homo sapiens
tcgcattcaacttaaatgcttttattgtcaatgtcttggaacaataagcaaacaatgcttaaatttttcattcaaattcactttccacatgtcaaaagacctcaaggtagaaaaaaatagaataaaaatataaatatctgagaatccatcttaataaataaattaaaaacacaataaaacgttttcatggaaaactgttaatgtcagaacattcagaccacctcaacaatgcatgatcagtaacattacgatgaacattgatgttgaagaaaaactacagtacatggatatagctatttatttctatctaccagaaaataaagtcgtatcttttcttagtataatattggtcatttctaatcagaacacactattgccaggaacacagtagttattgttaaaatcagctgcactggatacaatttgagaatatccagcaccaggttaattccaataatgaacccaataagattagttaatgcgtgagaagacta

SEQ ID NO: 136 - DNA, 546 bp, Homo sapiens
ttttttttttgagacagagtctcattctgtcgcccaggctggagtgcagtggtgtgatcttggctcactgcaacctccgcctcttgggttaaaagaattctcctgcctcagcctcctgagtagctgggattataggcacacaccaccacacccagctaatctttttgtattttttttttagtagagacagggtttcgccatgtcggccaggctggtcttgaactcctgacctcaggtggtccacccgcctcggcctcccaaagtgctggcattacaggcgtgaaccaccgtgcctggccggaagtctttaaaaaataaagtgattctactcttctaagcttacagagaccagaccaggtgaatgtaactggggaaaatcaagatggtacctctctgcattatcccgccagacactgtattttatgcattcatgtctaggatacagtgtgaaaattaaaaagtttagagggcagatgcaattgtggcaagtgacctgccaataaagcaggtgcagctatagaagctggcataggtatatccttaatg

SEQ ID NO: 137 - DNA, 455 bp, Homo sapiens
tttttttaataaagaaccaattttttttttacttaaatagattcaataaaaagaacaaacacacacaaacacaaacacgtcttaaaataaactctttagagactaagtgcgtgtttcttttccacagtacggtgcagagaggggagggcagggggcgggggtccccttcccaatgtccccgcgggcttgagtaccaggcggcggggccagctccgcggaatcgccccctcttcccctccctgttaaatacacaaatatattatattcaatatgaatcgagtctgtttccagcagaaaaaaaacatacaaaaaaaagtggaagggggggcttgtaaacgtcgaggtggaaggactgggcgcagggtaggagggccggagtccagtgtggtttgcggcgcccctaggtcccagggtgggtgcccaccgcctggttccctggaccccagtgggaggcc

SEQ ID NO: 138 - DNA, 448 bp, Homo sapiens
  misc_feature (1)..(448): "n" is an unknown nucleotide.
ctgcgaggacaaggtgaagacgctcaaggccgagaacgcngggctgtcgagtaccgccggcctcctccgggagcaggtggcccagctcaaacagaaggtcatgacccacgtcagcaacggctgtcagctgctgnttggggtcaagggacacgccttctgaacgtcccctgcccctttacggacaccccctcgcttggacggctgggcacacgctcccactggggtccagggagcaggcggtgggcacccacctgggacctaggggcgccgaaaccacactggactccggccctcctaccctgcgcccagtccttccacctcgacgtttacaagcccccccttccactttttttttgtatgttttttttctgcttggaaacagactccgattcatattgaatataatatatttgtgtanttaacagggaaggggaagaaggggggcgat

SEQ ID NO: 139 - DNA, 381 bp, Homo sapiens
  misc_feature (1)..(381): "n" is an unknown nucleotide.
tttaaagaaccaattttttttttacttaaatagattcaataaaaagaacaaacacacacaaacacaaacacgncttaaaataaactctttagagactaagtgcgtgtttcttttccacagtacggtgcagagaggggagggcagggggcgggggtcccttcccaatgtccccgcgggcttgagtaccagggcggcggggcagctccgnaatacngccccctcttcccctccctgttaaatacacaaatatattatattcaatatggaatcgagtctgtttccagcaggaaaaaaaaccatacaaaaaaaaggggggaggggggggggcctttgtaaancgtcgaggggtngggangggacttggggcccangggtggggga

SEQ ID NO: 140 - DNA, 419 bp, Homo sapiens
  misc_feature (1)..(419): "n" is an unknown nucleotide.
cgcatcgcctnggganggacaaggtgaagacgctcaaggccgagaacgcggggctgtcgagtaccgccggcctcctccgggagcaggtggcccagctcaaacagaaggtcatgacccacgtcagcaacggctgtcagctgctgcttggggtcaagggacacgccttctgaacgtcccctgcccctttacggacaccccctcgcttgggacggctgggcacacgncttcccactggggtccaggggagcaggcggtggggcacccaccctggggacctagggggcgccgcaaaccacattgggattccggccntcctaacccttgcgcccantccttttccacntcganttttaacaaagcccccctttccattttttttttgtnatgtttttttttttnttggtttgggaaacagattt

SEQ ID NO: 141 - DNA, 5460 bp, Homo sapiens
cgggcccggtgctgaagggcagggaacaacttgatggtgctactttgaactgcttttcttttctcctttttgcacaaagagtctcatgtctgatatttagacatgatgagctttgtgcaaaaggggagctggctacttctcgctctgcttcatcccactattattttggcacaacaggaagctgttgaaggaggatgttcccatcttggtcagtcctatgcggatagagatgtctggaagccagaaccatgccaaatatgtgtctgtgactcaggatccgttctctgcgatgacataatatgtgacgatcaagaattagactgccccaacccagaaattccatttggagaatgttgtgcagtttgcccacagcctccaactgctcctactcgccctcctaatggtcaaggacctcaaggccccaagggagatccaggccctcctggtattcctgggagaaatggtgaccctggtattccaggacaaccagggtcccctggttctcctggcccccctggaatctgtgaatcatgccctactggtcctcagaactattctccccagtatgattcatatgatgtcaagtctggagtagcagtaggaggactcgcaggctatcctggaccagctggccccccaggccctcccggtccccctggtacatctggtcatcctggttcccctggatctccaggataccaaggaccccctggtgaacctgggcaagctggtccttcaggccctccaggacctcctggtgctataggtccatctggtcctgctggaaaagatggagaatcaggtagacccggacgacctggagagcgaggattgcctggacctccaggtatcaaaggtccagctgggatacctggattccctggtatgaaaggacacagaggcttcgatggacgaaatggagaaaagggtgaaacaggtgctcctggattaaagggtgaaaatggtcttccaggcgaaaatggagctcctggacccatgggtccaagaggggctcctggtgagcgaggacggccaggacttcctggggctgcaggtgctcggggtaatgacggtgctcgaggcagtgatggtcaaccaggccctcctggtcctcctggaactgccggattccctggatcccctggtgctaagggtgaagttggacctgcagggtctcctggttcaaatggtgcccctggacaaagaggagaacctggacctcagggacacgctggtgctcaaggtcctcctggccctcctgggattaatggtagtcctggtggtaaaggcgaaatgggtcccgctggcattcctggagctcctggactgatgggagcccggggtcctccaggaccagccggtgctaatggtgctcctggactgcgaggtggtgcaggtgagcctggtaagaatggtgccaaaggagagcccggaccacgtggtgaacgcggtgaggctggtattccaggtgttccaggagctaaaggcgaagatggcaaggatggatcacctggagaacctggtgcaaatgggcttccaggagctgcaggagaaaggggtgcccctgggttccgaggacctgctggaccaaatggcatcccaggagaaaagggtcctgctggagagcgtggtgctccaggccctgcagggcccagaggagctgctggagaacctggcagagatggcgtccctggaggtccaggaatgaggggcatgcccggaagtccaggaggaccaggaagtgatgggaaaccagggcctcccggaagtcaaggagaaagtggtcgaccaggtcctcctgggccatctggtccccgaggtcagcctggtgtcatgggcttccccggtcctaaaggaaatgatggtgctcctggtaagaatggagaacgaggtggccctggaggacctggccctcagggtcctcctggaaagaatggtgaaactggacctcaaggacccccagggcctactgggcctggtggtgacaaaggagacacaggaccccctggtccacaaggattacaaggcttgcctggtacaggtggtcctccaggagaaaatggaaaacctggggaaccaggtccaaagggtgatgccggtgcacctggagctccaggaggcaagggtgatgctggtgcccctggtgaacgtggacctcctggattggcaggggccccaggacttagaggtggagctggtccccctggtcccgaaggaggaaagggtgctgctggtcctcctgggccacctggtgctgctggtactcctggtctgcaaggaatgcctggagaaagaggaggtcttggaagtcctggtccaaagggtgacaagggtgaaccaggcggcccaggtgctgatggtgtcccagggaaagatggcccaaggggtcctactggtcctattggtcctcctggcccagctggccagcctggagataagggtgaaggtggtgcccccggacttccaggtatagctggacctcgtggtagccctggtgagagaggtgaaactggccctccaggacctgctggtttccctggtgctcctggacagaatggtgaacctggtggtaaaggagaaagaggggctccgggtgagaaaggtgaaggaggccctcctggagttgcaggaccccctggaggttctggacctgctggtcctcctggtccccaaggtgtcaaaggtgaacgtggcagtcctggtggacctggtgctgctggcttccctggtgctcgtggtcttcctggtcctcctggtagtaatggtaacccaggacccccaggtcccagcggttctccaggcaaggatgggcccccaggtcctgcgggtaacactggtgctcctggcagccctggagtgtctggaccaaaaggtgatgctggccaaccaggagagaagggatcgcctggtgcccagggcccaccaggagctccaggcccacttgggattgctgggatcactggagcacggggtcttgcaggaccaccaggcatgccaggtcctaggggaagccctggccctcagggtgtcaagggtgaaagtgggaaaccaggagctaacggtctcagtggagaacgtggtccccctggaccccagggtcttcctggtctggctggtacagctggtgaacctggaagagatggaaaccctggatcagatggtcttccaggccgagatggatctcctggtggcaagggtgatcgtggtgaaaatggctctcctggtgcccctggcgctcctggtcatccaggcccacctggtcctgtcggtccagctggaaagagtggtgacagaggagaaagtggccctgctggccctgctggtgctcccggtcctgctggttcccgaggtgctcctggtcctcaaggcccacgtggtgacaaaggtgaaacaggtgaacgtggagctgctggcatcaaaggacatcgaggattccctggtaatccaggtgccccaggttctccaggccctgctggtcagcagggtgcaatcggcagtccaggacctgcaggccccagaggacctgttggacccagtggacctcctggcaaagatggaaccagtggacatccaggtcccattggaccaccagggcctcgaggtaacagaggtgaaagaggatctgagggctccccaggccacccagggcaaccaggccctcctggacctcctggtgcccctggtccttgctgtggtggtgttggagccgctgccattgctgggattggaggtgaaaaagctggcggttttgccccgtattatggagatgaaccaatggatttcaaaatcaacaccgatgagattatgacttcactcaagtctgttaatggacaaatagaaagcctcattagtcctgatggttctcgtaaaaaccccgctagaaactgcagagacctgaaattctgccatcctgaactcaagagtggagaatactgggttgaccctaaccaaggatgcaaattggatgctatcaaggtattctgtaatatggaaactggggaaacatgcataagtgccaatcctttgaatgttccacggaaacactggtggacagattctagtgctgagaagaaacacgtttggtttggagagtccatggatggtggttttcagtttagctacggcaatcctgaacttcctgaagatgtccttgatgtgcagctggcattccttcgacttctctccagccgagcttcccagaacatcacatatcactgcaaaaatagcattgcatacatggatcaggccagtggaaatgtaaagaaggccctgaagctgatggggtcaaatgaaggtgaattcaaggctgaaggaaatagcaaattcacctacacagttctggaggatggttgcacgaaacacactggggaatggagcaaaacagtctttgaatatcgaacacgcaaggctgtgagactacctattgtagatattgcaccctatgacattggtggtcctgatcaagaatttggtgtggacgttggccctgtttgctttttataaaccaaactctatctgaaatcccaacaaaaaaaatttaactccatatgtgttcctcttgttctaatcttgtcaaccagtgcaagtgaccgacaaaattccagttatttatttccaaaatgtttggaaacagtataatttgacaaagaaaaatgatacttctctttttttgctgttccaccaaatacaattcaaatgctttttgttttatttttttaccaattccaatttcaaaatgtctcaatggtgctataataaataaacttcaacactctttatgataacaacactgtgttatattctttgaatcctagcccatctgcagagcaatgactgtgctcaccagtaaaagataacctttctttctgaaatagtcaaatacgaaattagaaaagccctccctattttaactacctcaactggtcagaaacacagattgtattctatgagtcccagaagatgaaaaaaattttatacgttgataaaacttataaatttcattgattaatctcctggaagattggtttaaaaagaaaagtgtaatgcaagaatttaaagaaatatttttaaagccacaattattttaatattggatatcaactgcttgtaaaggtgctcctcttttttcttgtcattgctggtcaagattactaatatttgggaaggctttaaagacgcatgttatggtgctaatgtactttcacttttaaactctagatcagaattgttgacttgcattcagaacataaatgcacaaaatctgtacatgtctcccatcagaaagattcattggcatgccacagggattctcctccttcatcctgtaaaggtcaacaataaaaaccaaattatggggctgcttttgtcacactagcatagagaatgtgttgaaatttaactttgtaagcttgtatgtggttgttgatcttttttttccttacagacacccataataaaata

SEQ ID NO: 142 - DNA, 515 bp, Homo sapiens
  misc_feature (1)..(515): "n" represents an unknown nucleotide.
aaagagtgttgaagtttatttattatagcaccattgagacattttgaaattggaattggtaaaaaaataaaacaaaaagcatttgaattgtatttggtggacagcaaaaaaagagaagtatcatttttctttgtcaaattatactgtttccaaacattttggaaataaatanctgggaattttgtcggtcacttgcactgggttgacaaggattaggancaagagggccacatatgggagttaaattttttttgttgggggatttcaggataggagtttgggtttattaaaaaggnaacaggggccnaccggcccaccacccaaattcttgntccagggncccacccaatgtcatggggggtgccaatatcctccatggggtgggtcctcacagcccttgcggnggttccggtattccaggcctgttttgctccccttcccccagtgtgtttcggngcacnctcctcccnggctgtgtaggggggngattttgcntatttcccttcggnccttgg

SEQ ID NO: 143 - DNA, 417 bp, Homo sapiens
  misc_feature (1)..(417): "n" represents an unknown nucleotide.
cancggaaacactggtggacagattctagtgctgagaagaaacacgtttggtttggagagtccatggatggtggttttcagtttagctacggaatcctgaacttcctgaagatgtccttgatgtgcagctggcattccttcgacttctctccagccgagcttcccagaacatcacatatcactgcaaaaatagcattgcatacatggatcaggccagtgggaaatgtaaagaaggccctgaagctgatgggggtcaaatgaaggtgaatttcaaggctgaagggaaataggcaaatttcaccttacacagtttctgggagggtggtttgcacggaaacacantggggggattgggagccaaaacatctttttgattttccgaacacggcaggcntgttgagganttacccatttgtt

SEQ ID NO: 144 - DNA, 313 bp, Homo sapiens
ttttttttttctttgccatttgctatgttttattttgctagtagcttattaaacataacatgcaaataatcaaagagaaacatacatgacttagagtgaaaaataattctagaaaagtttcactaggtaagtatgcaaattcttattctaaaaatacttctttaagtgcatgaagcttcatgtattttgcaatattcttggcctcaatatctaccacctattttttaaccagacaaatttgaatgtatcaagataatttggtgcaagagagtaacatccatatgtatttaatccaagctttgaggaacattaa

SEQ ID NO: 145 - DNA, 557 bp, Homo sapiens
gccattatcctactccaagatcaagcatttgcgttgtggatggcaatcgcatctcagaaaccagtcttccaccggatatgtatgaatgtctacgtgttgctaacgaagtcactcttaattaatatctgtatcctggaacaatattttatggttatgtttttctgtgtgtcagttttcatagtatccatattttattactgtttattacttccatgaattttaaaatctgagggaaatgttttgtaaacatttattttttttaaagaaaagatgaaaggcaggcctatttcatcacaagaacacacacatatacacgaatagacatcaaactcaatgctttatttgtaaatttagtgtttttttatttctactgtcaaatgatgtgcaaaaccttttactggttgcatggaaatcagccaagttttataatccttaaatcttaatgttcctcaaagcttggattaaatacatatggatgttactctcttgcaccaaattatcttgatacattcaaatttgtctggttaaaaaataggtggtagatattgaggccaaga

SEQ ID NO: 146 - DNA, 1896 bp, Homo sapiens
gtattttatataaacagaagagctaagttcctgaagactaagctagatagctgcagctatatgtaaattgtatatttttatgaacttttgaagcacacactcctgtttccctctgtgtagctttgtggggatttcatgtatatatgctgtctgaaagaatccagaggttggagtgccaatagaaaatgaaaacaaatgccttgtactacaggcagcctctgaaggtgaccagataactgtcttcactgtgaccagtcggagtccctgcttgcttgtgaagaaggggcttttgtaccttgttggagatgccacctcagaagttcacactgtgcaggaaaaaggttttattctctcctggcatacattagaatgtcagatgcctgcatccatgtggaccacgatgggcctctaaaaattggtgggcagggggtttgcttatgagttttctctggaaaccgattttactcctggatgtattgaatgccccttgagctttatgagatacgagtccacatggataaaatgttagagagtggagttctacagaggattccaggaagaggccatgtctgtgcagtcctagttccagacaggtgagaagctccaggaactactggctaccttgacaagctgggtaaatagttatcattctgggtaactggttgaaactctgacttttggacaagtaattcctggggttctgtctttggtagcatcaccagggatatttgggtgggacagacagaagacacacagctgcctgttctctcctgcccatcatgtttggcccactagatgaagctgtactcagcaatttagggaatgtaacccttctcagaactggccattttcaggggaagcttgggagagcaatagtatggtgagccccttagagatgagcgcctactccttcttggcgaatgctgccttcagatgcttaccaagtggtcactgcatctagtaagattatatttccagtacacttccttagggcagaaacaccatcctatcaggtttggtcagtcccttcttcatgaagggagtcatggggaattcctgaaaattttcttccttctgcagacagttggatgagtcccttagagaaggcatccagagacataactaaactgaatatcatcccatattgattttaggaattgactctaaaactctgtgcagaatcttgtgttgggattgtatcttgacattcctgttgtgttatttttcttaactggagtgtgtgctgcctttcaggtacaatttttgtgtaataaaagccagtgcattaagtttatatagactactttctatgcaagactgagatatggaatagataggaagagatatgtactgctgggtacatggacagtaagtgtgttttcagatggagtaccagcaccgaaaatgggttgagggaggatgggttgtatgtatgtttctgcccactaattttgagcagccatattatgaattaaatcgtcacagccaagtaataacccaagaatggtatgagtttcatgtgtaatagctcaaatggaataagcatgaatgctggagtggaccattatcctcaaatattctatgtcacttctcatttaaagactcttgttatgaactattagaaactttaggcaaaatcaaaagtatttgcggcaaaataaaggcctattctactcttatttaaagtgaaacactgtatacttgtttctctccaaagcgaaattaagtatttataatttcaattgcctcgataagtttccaagtcactgaaatctgctgaaggttttactgtattgttgcacaactttaagataatttttgtctcaatgtcaacttttttcactgaataaaaatttaactgggtcaagaaaaaaaaaaaaaaaaaaaaaaaaaaaa

SEQ ID NO: 147 - DNA, 387 bp, Homo sapiens
cttgacccagttaaatttttattcagtgaaaaaagttgacattgagacaaaaattatcttaaagttgtgcaacaatacagtaaaaccttcagcagatttcagtgacttggaaacttatcgaggcaattgaaattataaatacttaatttcgctttggagagaaacaagtatacagtgtttcactttaaataagagtagaataggcctttattttgccgcaaatacttttgattttgcctaaagtttctaatagttcataacaagagtctttaaatgagaagtgacatagaatatttcgaggataatggtccactccagcattcatgcttattccatttggagctattacacatgaaactcataccattcttgggttattacttgggc

SEQ ID NO: 148 - DNA, 481 bp, Homo sapiens
  misc_feature (1)..(481): "n" represents an unknown nucleotide
nggtgggacagacagaagacacacagctgcctgttctctcctgcccatcatgtttggcccactagatgaagctgtactcagcaatttagggaatgtaacccttctcagaactggccattttcaggggaagcttgggagagcaatagtatggtgagccccttagagatgagcgcctactccttcttggcgaatntgccttcagatgcttaccaagtggtcactgcatctagtaagattatatttccagtacacttccttagggcagaaacaccatcctatcaggtttggtcagtcccttcttcatgaagggagtcatggggaattcctgaaaattttcttccttctgcagacagttggatgagtcccttaagagaaggcatccagagacataaactaaaactggaatatcatcccatatttgatttttaaggaattgactctaaaactctgtgcagaatcttgtgttggggattgtatccta

SEQ ID NO: 149 - DNA, 6840 bp, Homo sapiens
ccggcccagcggctctcctggcctcgcgctgcacattctctcctggcggcggcgccacctgcagtagcgttcgcccgaacatggcgacacggagcagcaggagggagtcgcgactcccgttcctattcaccctggtcgcactgctgccgcccggagctctctgcgaagtctggacgcagaggctgcacggcggcagcgcgcccttgccccaggaccggggcttcctcgtggtgcagggcgacccgcgcgagctgcggctgtgggcgcgcggggatgccaggggggcgagccgcgcggacgagaagccgctccggaggaaacggagcgctgccctgcagcccgagcccatcaaggtgtacggacaggttagtctgaatgattcccacaatcagatggtggtgcactgggctggagagaaaagcaacgtgatcgtggccttggcccgagatagcctggcattggcgaggcccaagagcagtgatgtgtacgtgtcttacgactatggaaaatcattcaagaaaatttcagacaagttaaactttggcttgggaaataggagtgaagctgttatcgcccagttctaccacagccctgcggacaacaagcggtacatctttgcagacgcttatgcccagtacctctggatcacgtttgacttctgcaacactcttcaaggcttttccatcccatttcgggcagctgatctcctcctacacagtaaggcctccaaccttctcttgggctttgacaggtcccaccccaacaagcagctgtggaagtcagatgactttggccagacctggatcatgattcaggaacatgtcaagtccttttcttggggaattgatccctatgacaaaccaaataccatctacattgaacgacacgaaccctctggctactccactgtcttccgaagtacagatttcttccagtcccgggaaaaccaggaagtgatccttgaggaagtgagagattttcagcttcgggacaagtacatgtttgctacaaaggtggtgcatctcttgggcagtgaacagcagtcttctgtccagctctgggtctcctttggccggaagcccatgagagcagcccagtttgtcacaagacatcctattaatgaatattacatcgcagatgcctccgaggaccaggtgtttgtgtgtgtcagccacagtaacaaccgcaccaatttatacatctcagaggcagaggggctgaagttctccctgtccttggagaacgtgctctattacagcccaggaggggccggcagtgacaccttggtgaggtattttgcaaatgaaccatttgctgacttccaccgagtggaaggattgcaaggagtctacattgctactctgattaatggttctatgaatgaggagaacatgagatcggtcatcacctttgacaaagggggaacctgggagtttcttcaggctccagccttcacgggatatggagagaaaatcaattgtgagctttcccagggctgttcccttcatctggctcagcgcctcagtcagctcctcaacctccagctccggagaatgcccatcctgtccaaggagtcggctccaggcctcatcatcgccactggctcagtgggaaagaacttggctagcaagacaaacgtgtacatctctagcagtgctggagccaggtggcgagaggcacttcctggacctcactactacacatggggagaccacggcggaatcatcacggccattgcccagggcatggaaaccaacgagctaaaatacagtaccaatgaaggggagacctggaaaacattcatcttctctgagaagccagtgtttgtgtatggcctcctcacagaacctggggagaagagcactgtcttcaccatctttggctcgaacaaagagaatgtccacagctggctgatcctccaggtcaatgccacggatgccttgggagttccctgcacagagaatgactacaagctgtggtcaccatctgatgagcgggggaatgagtgtttgctgggacacaagactgttttcaaacggcggaccccccatgccacatgcttcaatggagaggactttgacaggccggtggtcgtgtccaactgctcctgcacccgggaggactatgagtgtgacttcggtttcaagatgagtgaagatttgtcattagaggtttgtgttccagatccggaattttctggaaagtcatactcccctcctgtgccttgccctgtgggttctacttacaggagaacgagaggctaccggaagatttctggggacacttgtagcggaggagatgttgaagcgcgactggaaggagagctggtcccctgtcccctggcagaagagaacgagttcattctgtatgctgtgaggaaatccatctaccgctatgacctggcctcgggagccaccgagcagttgcctctcaccgggctacgggcagcagtggccctggactttgactatgagcacaactgtttgtattggtccgacctggccttggacgtcatccagcgcctctgtttgaatggaagcacagggcaagaggtgatcatcaattctggcctggagacagtagaagctttggcttttgaacccctcagccagctgctttactgggtagatgcaggcttcaaaaagattgaggtagctaatccagatggcgacttccgactcacaatcgtcaattcctctgtgcttgatcgtcccagggctctggtcctcgtgccccaagagggggtgatgttctggacagactggggagacctgaagcctgggatttatcggagcaatatggatggttctgctgcctatcacctggtgtctgaggatgtgaagtggcccaatggcatctctgtggacgaccagtggatttactggacggatgcctacctggagtgcatagagcggatcacgttcagtggccagcagcgctctgtcattctggacaacctcccgcacccctatgccattgctgtctttaagaatgaaatctactgggatgactggtcacagctcagcatattccgagcttccaaatacagtgggtcccagatggagattctggcaaaccagctcacggggctcatggacatgaagattttctacaaggggaagaacactggaagcaatgcctgtgtgcccaggccatgcagcctgctgtgcctgcccaaggccaacaacagtagaagctgcaggtgtccagaggatgtgtccagcagtgtgcttccatcaggggacctgatgtgtgactgccctcagggctatcagctcaagaacaatacctgtgtcaaagaagagaacacctgtcttcgcaaccagtatcgctgcagcaacgggaactgtatcaacagcatttggtggtgtgactttgacaacgactgtggagacatgagcgatgagagaaactgccctaccaccatctgtgacctggacacccagtttcgttgccaggagtctgggacttgtatcccactgtcctataaatgtgaccttgaggatgactgtggagacaacagtgatgaaagtcattgtgaaatgcaccagtgccggagtgacgagtacaactgcagttccggcatgtgcatccgctcctcctgggtatgtgacggggacaacgactgcagggactggtctgatgaagccaactgtaccgccatctatcacacctgtgaggcctccaacttccagtgccgaaacgggcactgcatcccccagcggtgggcgtgtgacggggatacggactgccaggatggttccgatgaggatccagtcaactgtgagaagaagtgcaatggattccgctgcccaaacggcacttgcatcccatccagcaaacattgtgatggtctgcgtgattgctctgatggctccgatgaacagcactgcgagcccctctgtacgcacttcatggactttgtgtgtaagaaccgccagcagtgcctgttccactccatggtctgtgacggaatcatccagtgccgcgacgggtccgatgaggatgcggcgtttgcaggatgctcccaagatcctgagttccacaaggtatgtgatgagttcggtttccagtgtcagaatggagtgtgcatcagtttgatttggaagtgcgacgggatggatgattgcggcgattattctgatgaagccaactgcgaaaaccccacagaagccccaaactgctcccgctacttccagtttcggtgtgagaatggccactgcatccccaacagatggaaatgtgacagggagaacgactgtggggactggtctgatgagaaggattgtggagattcacatattcttcccttctcgactcctgggccctccacgtgtctgcccaattactaccgctgcagcagtgggacctgcgtgatggacacctgggtgtgcgacgggtaccgagattgtgcagatggctctgacgaggaagcctgccccttgcttgcaaacgtcactgctgcctccactcccacccaacttgggcgatgtgaccgatttgagttcgaatgccaccaaccgaagacgtgtattcccaactggaagcgctgtgacggccaccaagattgccaggatggccgggacgaggccaattgccccacacacagcaccttgacttgcatgagcagggagttccagtgcgaggacggggaggcctgcattgtgctctcggagcgctgcgacggcttcctggactgctcggacgagagcgatgaaaaggcctgcagtgatgagttgactgtgtacaaagtacagaatcttcagtggacagctgacttctctggggatgtgactttgacctggatgaggcccaaaaaaatgccctctgcatcttgtgtatataatgtctactacagggtggttggagagagcatatggaagactctggagacccacagcaataagacaaacactgtattaaaagtcttgaaaccagataccacgtatcaggttaaagtacaggttcagtgtctcagcaaggcacacaacaccaatgactttgtgaccctgaggaccccagagggattgccagatgcccctcgaaatctccagctgtcactccccagggaagcagaaggtgtgattgtaggccactgggctcctcccatccacacccatggcctcatccgtgagtacattgtagaatacagcaggagtggttccaagatgtgggcctcccagagggctgctagtaactttacagaaatcaagaacttattggtcaacactctatacaccgtcagagtggctgcggtgactagtcgtggaataggaaactggagcgattctaaatccattaccaccataaaaggaaaagtgatcccaccaccagatatccacattgacagctatggtgaaaattatctaagcttcaccctgaccatggagagtgatatcaaggtgaatggctatgtggtgaaccttttctgggcatttgacacccacaagcaagagaggagaactttgaacttccgaggaagcatattgtcacacaaagttggcaatctgacagctcatacatcctatgagatttctgcctgggccaagactgacttgggggatagccctctggcatttgagcatgttatgaccagaggggttcgcccacctgcacctagcctcaaggccaaagccatcaaccagactgcagtggaatgtacctggaccggcccccggaatgtggtttatggtattttctatgccacgtcctttcttgacctctatcgcaacccgaagagcttgactacttcactccacaacaagacggtcattgtcagtaaggatgagcagtatttgtttctggtccgtgtagtggtaccctaccaggggccatcctctgactacgttgtagtgaagatgatcccggacagcaggcttccaccccgtcacctgcatgtggttcatacgggcaaaacctccgtggtcatcaagtgggaatcaccgtatgactctcctgaccaggacttgttgtatgcaattgcagtcaaagatctcataagaaagactgacaggagctacaaagtaaaatcccgtaacagcactgtggaatacacccttaacaagttggagcctggcgggaaataccacatcattgtccaactggggaacatgagcaaagattccagcataaaaattaccacagtttcattatcagcacctgatgccttaaaaatcataacagaaaatgatcatgttcttctgttttggaaaagcctggctttaaaggaaaagcattttaatgaaagcaggggctatgagatacacatgtttgatagtgccatgaatatcacagcttaccttgggaatactactgacaatttctttaaaatttccaacctgaagatgggtcataattacacgttcaccgtccaagcaagatgcctttttggcaaccagatctgtggggagcctgccatcctgctgtacgatgagctggggtctggtgcagatgcatctgcaacgcaggctgccagatctacggatgttgctgctgtggtggtgcccatcttattcctgatactgctgagcctgggggtggggtttgccatcctgtacacgaagcaccggaggctgcagagcagcttcaccgccttcgccaacagccactacagctccaggctggggtccgcaatcttctcctctggggatgacctgggggaagatgatgaagatgcccctatgataactggattttcagatgacgtccccatggtgatagcctgaaagagctttcctcactagaaaccaaatggtgtaaatattttatttgataaagatagttgatggtttattttaaaagatgcactttgagttgcaatatgttatttttatatgggcc

SEQ ID NO: 150 - DNA, 421 bp, Homo sapiens
  misc_feature (1)..(421): "n" represents an unknown nucleotide
ttttgtttttggcccatataaaaataacatattgcaactcaaagtgcatcttttaaaataaaccatcaactatctttatcaaataaaatatttacaccatttggtttctagtgaggaaagctctttcaggctatcaccatggggacgtcatctcgaaaatccagttatcataggggcatcttcatcatcttcccccaggtcatccccagaggagaagattgcggaccccagcctggagctgtagtggctgttggcgaaggcggtgaagctgctctgcncctccggtgcttccgtgtacaggatggcaaaccccacccccaggctcagcagtatcaggaataagatgggcaccaccacagcagcaacatccgtagatctgggcagctgcgtttgcagatgcatctgnacccagaccccagct

SEQ ID NO: 151 - DNA, 525 bp, Homo sapiens
  misc_feature (1)..(525): "n" represents an unknown nucleotide
aactttgaacttccgaggaagcatattgtcacacaaagttggcaatctgacagctcatacatcctatgagatttctgcctgggccaagactgacttgggggatagccctctgnatttgagcatgttatgaccagaggggttcgcccacctgcacctagcctcaaggccaaagccatcaaccagactgcagtggaatgtacctggaccggcccccggaatgtggttnatggtattttctatgccacgtcctttcttganctctatcgcaanccgaagnancttggntaacttcaactccacaacaagacggtcattgtcagtaaggatgagcagtatttgtttctggtccgtgtagtggtaccctaccaggggccatcctctgactacgttgtagtgaaggatgatcccggacagcaggcttccaccccgttntctggcatgtggttcatacgggcaaaaacctccggtggtccatcaagtggggnatcaccgtatgactctcctgaccaggacttgttgtatgna

SEQ ID NO: 152 - DNA, 474 bp, Homo sapiens
gttttttagaaagctgcagtttgtgaatttctcttgctttttaaaacagaatatttccaaaacttgggcatcaatgcttggtctttttaggttggggatagaagactgggccatcttcacagactctcagaccccggctctcggcggccccatttgccagccagacttcctgcttgggggacggctgctcccccggctcggtgcagttttgcagctgctggtcttgcttagtgaggcacagttctatctgaccaattgtctgtacttcctcatcctggcttggtggaaggcactggattttgggtatcactccatatactctggcgagggcatctttaaaatctgcaacttggtagtaattgatggatggttttatccccaattttagaagcacactgttgaggtccagctccctgtagagttccaggcttctgcaaagtacttcttctgggagttgagcgcatcacctgggcg

SEQ ID NO: 153 - DNA, 309 bp, Homo sapiens
aacaggactcaattatttacaaaagctaatgtgtgacaacttgatcttcttacttggaatcttcccttctaaaatttgatttatcctgaagtgtctgcttgacttatatcctgtgttgctgctggctttttccatgtgcattttttgcaagctgctctttttacttcagtctcgttaagtcttgcagttctggctagaggcctactgccatgaataagctgccgctccacagtggcttctttgaagtcttagagtcagatgagtttcaaggtgttcaggtttgtgatccagtgtggccccaggttctgg

SEQ ID NO: 154 - DNA, 1516 bp, Homo sapiens
atgcgggtcacggcgccccgaaccgtcctcctgctgctctggggggcagtggccctgaccgagacctgggccggctcccactccatgaggtatttctacaccgccatgtcccggcccggccgcggggagccccgcttcattgcagtgggctacgtggacgacacccagttcgtgaggttcgacagcgacgccgcgagtccgaggacggagccccgggcgccatggatagagcaggaggggccggagtattgggaccggaacacacagatcttcaagaccaacacacagacttaccgagagaacctgcggactcggctccgctactacaaccagagcgaggccgggtctcacacttggcagacgatgtatggctgcgacgtggggccggacgggcgcctcctccgcgggcataaccagtacgcctacgacggcaaagattacatcgccctgaacgaggacctgagctcctggaccgccgcggacaccgcggctcagatcacccagcgcaagtgggaggcggcccgtgaggcggagcagctgagagcctacctggagggcctgtgcgtggagtggctccgcagacacctggagaacgggaaggagacgctgcagcgcgcggaccccccaaagacacacgtgacccaccaccccgtctctgaccatgaggccaccctgaggtgctgggccctgggcttctaccctgcggagatcacactgacctggcagcgggatggcgaggaccaaactcaggacactgagcttgtggagaccagaccagcaggagatagaaccttccagaagtgggcagctgtggtggtgccttctggagaagagcagagatacacatgccatgtacagcatgaggggctgccgaagcccctcaccctgagatgggagccatcttcccagtccaccatccccatcgtgggcattgttgctggcctggctgtcctagcagttgtggtcatcggagctgtggtcgctactgtgatgtgtaggaggaagagctcaggtggaaaaggagggagctactctcaggctgcgtccagcgacagtgcccagggctctgatgtgtctctcacagcttgaaaagcctgagacagctgtcttgtgagggctgagatgcaggatttgttcactcctcccctttgtgacttcaagagcctctggcatctctttctgcaaaggcacctgaatgtgtctgcgttcctgttagcataatgtgaggaggtggagagacagcccacccttgtgtccactgtgacccctgttcccatgctgacctgtgtttcctccccagtcatctttcttgttccagagaggtggggctggatgtctccatctctgtctcaactttatgtgcactgagctgcaacttcttacttccctactgaaaataagaatctgaatatacatttgttttctcaaatatttgctatgagaggttgatggattaattaaataagtcaattcctggaatgtgagagagcaaataaagacctgagaaccttccaga

SEQ ID NO: 155 - DNA, 520 bp, Homo sapiens
ttattttctggaaggttctcaggtctttatttgctctctcaaattccaggaattgacttatttaattaatccatcaacctctcatagcaaatatttgagaaaacaaatttatattcagattcttattttcagtagggaagtaagaatttgcagctcagtgcccataaagttgagaccagagatggagacatccagcccaacttttctggaccagaaaagatgcctggggaggaacaccaggtcagcatgggaacaggggtcacgttggacacggggttggcctggtctctcaacttcctcacattatgctaacagggacgcggacccattagggtgcctttgcagaaagagatgcacaagctcttggaggtcccaaagggaagccgtgaagaattcctgaatctcagtccctcacaagacagctgtctcaggcttttcaagctgtgagagacacattcgagccctgggaactgtcgctgaacgcaccctgagagtagctccctcttttccaccgagctct

SEQ ID NO: 156 - DNA, 522 bp, Homo sapiens
gctgctgtgatgtgtaggaggaagagctcaggtggaaaaggagggagctactctcaggctgcgtgcacggacagtgcccagggctctgatgtgtctctcacagcttgaaaagcctgagacagctgtcttgtgagggactgagatgcaggatttcttcacgcctcccctttgtgacttcaagagcctctggcatctctttctgcaaaggcacctgaatgtgtctgcgtccctgttagcataatgtgaggaggtggagagaccagcccacccccgtgtccactgtgacccctgttcccatgctgacctgtgtttcctccccagtcatctttcctgttccagagaggtggggctggatgtctccatctctgtctcaactttatgtgcactgagctgcaacttcttacttccctacttgaaataagaatccgaatataaatttgtttttccaaatatttggcatgagaggttgatggattaattaattaggtcaattcgggaatttgagaggccaataaggccctg

SEQ ID NO: 157 - DNA, 1413 bp, Homo sapiens
tgctcccactccatgaggtatttcgacaccgccgtgtcccggcccggcgccggagagccccgcttcatctcagtgggctacgtggacgacacgcagttcgtgcggttcgacagcgacgccgcgagtccgagaggggagccgcgggcgccgtgggtggagcaggaggggccggagtattgggaccgggagacacagaagtacaagcgccaggcacaggctgaccgagtgagcctgcggaacctgcgcggctactacaaccagagcgaggacgggtctcacaccctccagaggatgtctggctgcgacctggggcccgacgggcgcctcctccgcgggtatgaccagtccgcctacgacggcaaggattacatcgccctgaacgaggacctgcgctcctggaccgcggcggacaccgcggctcagatcacccagcgcaagtgggaggcggcccgtgcggcggagcagctgagagcctacctggagggactgtgcgtggagtggctccgcagatacctggagaacgggaaggagacgctgcagcgcgcagaacccccaaagacacacgtgacccaccaccccctctctgaccatgaggccaccctgaggtgctgggccctgggcttctaccctgcggagatcacactgacctggcagcgggatggggaggaccagacccaggacaccgagcttgtggagaccaggccagcaggagatggaaccttccagaagtgggcagctgtggtggtgccttctggacaagagcagagatacacgtgccatatgcagcacgaggggctgcaagagcccctcaccctgagctgggagccatcttcccagcccaccatccccatcatgggcatcgttgctggcctggctgtcctggttgtcctagctgtccttggagctgtggtcaccgctatgatgtgtaggaggaagagctcaggtggaaaaggagggagctgctctcaggctgcgtgcagcaacagtgcccagggctctgatgagtctctcatcacttgtaaagcctgagacagctgcctgtgtgggactgagatgcaggatttcttcacacctctcctttgtgacttcaagagcctctggcatctctttctgcaaaggcacctgaatgtgtctgcgttcctgttagcataatgtgaggaggtggagagacagcccacccccgtgtccaccgtgacccctgtccccacactgacctgtgttccctccccgatcatctttcctgttccagagaggtggggctggatgtctccatctctgtctcaaattcatggtgcactgagctgcaacttcttacttccctaatgaagttaagaacctgaatataaatttgtgttctcaaatatttgctatgaagcgttgatggattaattaaataagtcaattcctaaaaac

SEQ ID NO: 158 - DNA, 440 bp, Homo sapiens
ctggaaggttctcaggtctttatttgctctctcaacttccaggaattgacttatttaattaatccatcaacccttcatagcaaatatttgagaaaacaaatttatattcaggttcttaacttcattagggaagtaagaagttgcagctcagcgcaccatgaagttgagacagagatggagacatccagcccacttctctggaacaggaaagatgatcggggagggaacacaggtcagtgtggggacaggggtcacggtggacacgggggtgggctgtctctccacctcctcacattatgctaacaggaacgcagacacattcagatgcctttgcagaaagagatgccagacgtcttgaagtcacaaaggagaggtgtgaagaaatcctgcatctcagtcccacacaggcagctgtctcaggctttacaagcgatgagaga

SEQ ID NO: 159 - DNA, 443 bp, Homo sapiens
cagtgcccagggctctgagtgagtctctcatcgcttgtaaacctgagacagctgcctgtgtgggactgagatgcaggatttcttcacacctctcctttgtgacttcaagagcctctgcgatctctttctgcaaaggcatctgaatgtgtctgcgttcctgttagcataatgtgaggaggtggagagacagcccacccccgtgtccaccgtgacccctgtccccacactgacctgtgttccctccccgatcatctttcctgttccagagaagtgggctggatgtctccatctctgtctcaacttcatggtgcgctgactgcaacttcttacttccctaatgaagttaagaacctgaatataaatttgttttctcaaatatttgctatgaagggttgatggattaattaaataagtcaattcctggaagttgagagagcaaataa

SEQ ID NO: 160 - DNA, 505 bp, Homo sapiens
  misc_feature (1)..(505): "n" represents an unknown nucleotide
tttttttttaaataaagcagccataatttatttatttatttttgttgggggggcatcaggaaccaatatcaggggtgagacaaatgtattccgaatttctcagtgaaagaacaaaagccacccaacatcaatgctcctcttcaagtctaccagctctgtttttccccaggaactattgatgactgaggagacttgaaaagagacctaaagttccactaagaagagatgggcaaacaatggtttcattgaacaggccaaagatgagaatgtggggaatctgctgtcttcatctgtgaatgtttcctacctgccgcaccctggggactcagggcatagtcactttccagacatgggtttgcctctnccatgtgggagtagggtcaaagtcttccgtcctncctgggccagggtggaagctnccagaagggacatgttttcagtttaagttancaaggttggcttgacattatttccctttggcanggaaaganggtttggcttggtt

SEQ ID NO: 161 - DNA, 425 bp, Homo sapiens
  misc_feature (1)..(425): "n" represents an unknown nucleotide
tcatcgagagaatcgcacggaagggtgaacaatgcaatattgtacctgacaatgtcgatgatattgtagctgacctggctccagaagagaaagatgaagatgacacccctgaaacctgcatctactccaactggtccccatggtccgcctgcagctcctccacctgtgacaaaggcaagaggatgcgacangcantgctganaagcacagctggnacctcagcgtcccctgccctgacacccagggacttccagccctgcatgggccctgggctggcagtgacgaaggacggctccaccttgcaccatgttccgagtgggattcacctgggttcgccctggcaggcattttncttgcgggcatggggcattgaggttcccngggagaggttntgttgaagcagttttcccgggaggaacgggttt

SEQ ID NO: 162 - DNA, 351 bp, Homo sapiens
taaagaaaacaagttttatttttatcatcagaacattctaataaaaatattatgatgagattagctacctttattctctgagccttgactctgtcccaggcctgccctggagcgcctgcacgctcagctccctgaggtaggtccggaggagaccccccgcttgcccccgccctcggccaggatacctctcacctcatgtcccctcctccagacccccacagccctggatgccccatagcagccctgccacggctggcagaactgcctccaccctccaccaacccccaagacaggcaggaaccgtctcaggctggcacacagcaggtggtgcgggggtagagggaagaggcg

SEQ ID NO: 163 - DNA, 454 bp, Homo sapiens
ctgaaacaagaagttaatggactgtttattgtaacttgatcctcccgagctgtgagcgcagtctgaggtgtgaggacacggcctcctgttggagtcccattttctccatcagggcacgtgggcggcttcctcaagcccggagagctcccaggcgcacaggggccgccggtaacaggggccgccggcataaggcccgtttccagtcatagcactgaagttgcaacttttttcttgtaattgttttgctactaagataatttcagaagttcagtctattttttcagcggatactgccgccaccaagaatccaaaacctatttttgacttggagagacttgcttttgttggttccgcccgtggagacgacgatagtgtttctgtataataaagtgtctgccggctcgcgggccaggatcctctcggtgggatgggcacacagacaggaggcccctca

SEQ ID NO: 164 - DNA, 4646 bp, Homo sapiens
cctactctattcagatattctccagattcctaaagattagagatcatttctcattctcctaggagtactcacttcaggaagcaaccagataaaagagaggtgcaacggaagccagaacattcctcctggaaattcaacctgtttcgcagtttctcgaggaatcagcattcagtcaatccgggccgggagcagtcatctgtggtgaggctgattggctgggcaggaacagcgccggggcgtgggctgagcacagcgcttcgctctctttgccacaggaagcctgagctcattcgagtagcggctcttccaagctcaaagaagcagaggccgctgttcgtttcctttaggtctttccactaaagtcggagtatcttcttccaagatttcacgtcttggtggccgttccaaggagcgcgaggtcgggatggatcttgaaggggaccgcaatggaggagcaaagaagaagaacttttttaaactgaacaataaaagtgaaaaagataagaaggaaaagaaaccaactgtcagtgtattttcaatgtttcgctattcaaattggcttgacaagttgtatatggtggtgggaactttggctgccatcatccatggggctggacttcctctcatgatgctggtgtttggagaaatgacagatatctttgcaaatgcaggaaatttagaagatctgatgtcaaacatcactaatagaagtgatatcaatgatacagggttcttcatgaatctggaggaagacatgaccaggtatgcctattattacagtggaattggtgctggggtgctggttgctgcttacattcaggtttcattttggtgcctggcagctggaagacaaatacacaaaattagaaaacagttttttcatgctataatgcgacaggagataggctggtttgatgtgcacgatgttggggagcttaacacccgacttacagatgatgtctctaagattaatgaagttattggtgacaaaattggaatgttctttcagtcaatggcaacatttttcactgggtttatagtaggatttacacgtggttggaagctaacccttgtgattttggccatcagtcctgttcttggactgtcagctgctgtctgggcaaagatactatcttcatttactgataaagaactcttagcgtatgcaaaagctggagcagtagctgaagaggtcttggcagcaattagaactgtgattgcatttggaggacaaaagaaagaacttgaaaggtacaacaaaaatttagaagaagctaaaagaattgggataaagaaagctattacagccaatatttctataggtgctgctttcctgctgatctatgcatcttatgctctggccttctggtatgggaccaccttggtcctctcaggggaatattctattggacaagtactcactgtattcttttctgtattaattggggcttttagtgttggacaggcatctccaagcattgaagcatttgcaaatgcaagaggagcagcttatgaaatcttcaagataattgataataagccaagtattgacagctattcgaagagtgggcacaaaccagataatattaagggaaatttggaattcagaaatgttcacttcagttacccatctcgaaaagaagttaagatcttgaagggcctgaacctgaaggtgcagagtgggcagacggtggccctggttggaaacagtggctgtgggaagagcacaacagtccagctgatgcagaggctctatgaccccacagaggggatggtcagtgttgatggacaggatattaggaccataaatgtaaggtttctacgggaaatcattggtgtggtgagtcaggaacctgtattgtttgccaccacgatagctgaaaacattcgctatggccgtgaaaatgtcaccatggatgagattgagaaagctgtcaaggaagccaatgcctatgactttatcatgaaactgcctcataaatttgacaccctggttggagagagaggggcccagttgagtggtgggcagaagcagaggatcgccattgcacgtgccctggttcgcaaccccaagatcctcctgctggatgaggccacgtcagccttggacacagaaagcgaagcagtggttcaggtggctctggataaggccagaaaaggtcggaccaccattgtgatagctcatcgtttgtctacagttcgtaatgctgacgtcatcgctggtttcgatgatggagtcattgtggagaaaggaaatcatgatgaactcatgaaagagaaaggcatttacttcaaacttgtcacaatgcagacagcaggaaatgaagttgaattagaaaatgcagctgatgaatccaaaagtgaaattgatgccttggaaatgtcttcaaatgattcaagatccagtctaataagaaaaagatcaactcgtaggagtgtccgtggatcacaagcccaagacagaaagcttagtaccaaagaggctctggatgaaagtatacctccagtttccttttggaggattatgaagctaaatttaactgaatggccttattttgttgttggtgtattttgtgccattataaatggaggcctgcaaccagcatttgcaataatattttcaaagattataggggtttttacaagaattgatgatcctgaaacaaaacgacagaatagtaacttgttttcactattgtttctagcccttggaattatttcttttattacatttttccttcagggtttcacatttggcaaagctggagagatcctcaccaagcggctccgatacatggttttccgatccatgctcagacaggatgtgagttggtttgatgaccctaaaaacaccactggagcattgactaccaggctcgccaatgatgctgctcaagttaaaggggctataggttccaggcttgctgtaattacccagaatatagcaaatcttgggacaggaataattatatccttcatctatggttggcaactaacactgttactcttagcaattgtacccatcattgcaatagcaggagttgttgaaatgaaaatgttgtctggacaagcactgaaagataagaaagaactagaaggtgctgggaagatcgctactgaagcaatagaaaacttccgaaccgttgtttctttgactcaggagcagaagtttgaacatatgtatgctcagagtttgcaggtaccatacagaaactctttgaggaaagcacacatctttggaattacattttccttcacccaggcaatgatgtatttttcctatgctggatgtttccggtttggagcctacttggtggcacataaactcatgagctttgaggatgttctgttagtattttcagctgttgtctttggtgccatggccgtggggcaagtcagttcatttgctcctgactatgccaaagccaaaatatcagcagcccacatcatcatgatcattgaaaaaacccctttgattgacagctacagcacggaaggcctaatgccgaacacattggaaggaaatgtcacatttggtgaagttgtattcaactatcccacccgaccggacatcccagtgcttcagggactgagcctggaggtgaagaagggccagacgctggctctggtgggcagcagtggctgtgggaagagcacagtggtccagctcctggagcggttctacgaccccttggcagggaaagtgctgcttgatggcaaagaaataaagcgactgaatgttcagtggctccgagcacacctgggcatcgtgtcccaggagcccatcctgtttgactgcagcattgctgagaacattgcctatggagacaacagccgggtggtgtcacaggaagagatcgtgagggcagcaaaggaggccaacatacatgccttcatcgagtcactgcctaataaatatagcactaaagtaggagacaaaggaactcagctctctggtggccagaaacaacgcattgccatagctcgtgcccttgttagacagcctcatattttgcttttggatgaagccacgtcagctctggatacagaaagtgaaaaggttgtccaagaagccctggacaaagccagagaaggccgcacctgcattgtgattgctcaccgcctgtccaccatccagaatgcagacttaatagtggtgtttcagaatggcagagtcaaggagcatggcacgcatcagcagctgctggcacagaaaggcatctatttttcaatggtcagtgtccaggctggaacaaagcgccagtgaactctgactgtatgagatgttaaatactttttaatatttgtttagatatgacatttattcaaagttaaaagcaaacacttacagaattatgaagaggtatctgtttaacatttcctcagtcaagttcagagtcttcagagacttcgtaattaaaggaacagagtgagagacatcatcaagtggagagaaatcatagtttaaactgcattataaattttataacagaattaaagtagattttaaaagataaaatgtgtaattttgtttatattttcccatttggactgtaactgactgccttgctaaaagattatagaagtagcaaaaagtattgaaatgtttgcataaagtgtctataataaaactaaactttcatgtg

SEQ ID NO: 165 - DNA, 513 bp, Homo sapiens
cacatgaaagtttagttttattatagacactttatgcaaacatttcaatactttttgctacttctataatcttttagcaaggcagtcagttacagtccaaatgggaaaatataaacaaaattacacattttatcttttaaaatctactttaattctgttataaaatttataatgcagtttaaactatgatttctctccacttgatgatgtctctcactctgttcctttaattacgaagtctctgaagactctgaacttgactgaggaaatgttaaacagatacctcttcataattctgtaagtgtttgcttttaactttgaataaatgtcatatctaaacaaatattaaaaagtatttaacatctcatacagtcagagttcactggcgctttgttccagcctggacactgaccattgaaaaatagatgcctttctgtgccagcagctgctgatgcgtgccatgctccctgactctgccattctgaaacaccactatttagtctgcattcggga

SEQ ID NO: 166 - DNA, 528 bp, Homo sapiens
ggaactcagctctctggtggccagaaacaacgcattgccatagctcgtgcccttgttagacagcctcatattttgcttttggatgaagccacgtcagctctggatacagaaagtgaaaaggttgtccaagaagccctggacaaagccagagaaggccgcacctgcattgtgattgctcaccgcctgtccaccatccagaatgcagacttaatagtggtgtttcagaatggcagagtcaaggagcatggcacgcatcagcagctgctggcacagaaaggcatctatttttcaatggtcagtgtccaggctggaacaaagcgccagtgaactctgactgtatgagatgttaaatactttttaatatttgtttagatatgacatttattcaaagttaaaagcaaacacttacagaattatgaagaggtatctgtttagcatttcctcagtcaagttcagagtcttcagagacttcgtaattaaaggaacagagtgagagacatcatcaagtggggagaaatcatagtttaa

SEQ ID NO: 167 - DNA, 318 bp, Homo sapiens
  misc_feature (1)..(318): "n" represents an unknown nucleotide
ttttttttttacactcagattgtttatttaaaaatgcccaaaacacaaaaatagacttttaaaggtaataatatatattactaaatatattatagtctacttataataattatatcgtcgttttcaatattacaaaaaaaggaagnaaaatacaagggaagcagacgacccaatatatataantcctataaaancatattaggnataantaaagtcgtcanaaataaagggcccattgatttatggggtgggggtttgggnagcggctttggctacttgcttttggggggggtaattttgagcncccgggggttcccc

SEQ ID NO: 168 - DNA, 400 bp, Homo sapiens
  misc_feature (1)..(400): "n" represents an unknown nucleotide
tcatggccaaccgttacaccatggatctgactgccatctacgagagcctcctgtcgctgagccctgacgtgcccgtgccatccgaccatggagggactgagtcagcccaggcnggctcctcgggaccctggagcctgagccctccgactccagcccgtctgggtcacctcccgcctgcctggccgctccaccagcctagtggagggcgcagctgtggtggntgccccancccctggtttcgcaccgctggctccccgnctgggncctgagctgtcancctcaaccactttgnccactgcaaccttcaccaaccnntngngntacaagactgagctatgtcggaccttntcagagagtgggcgntgcgntacggggcaagtgccagtttgnccatngctgg

SEQ ID NO: 169 - DNA, 1684 bp, Homo sapiens
cgttacaccatggatctgactgccatctacgagagcctcctgtcgctgagccctgacgtgcccgtgccatccgaccatggagggactgagtccagcccaggctggggctcctcgggaccctggagcctgagcccctccgactccagcccgtctggggtcacctcccgcctgcctggccgctccaccagcctagtggagggccgcagctgtggctgggtgcccccaccccctggcttcgcaccgctggctccccgcctgggccctgagctgtcaccctcacccacttcgcccactgcaacctccaccaccccctcgcgctacaagactgagctatgtcggaccttctcagagagtgggcgctgccgctacggggccaagtgccagtttgcccatggcctgggcgagctgcgccaggccaatcgccaccccaaatacaagacggaactctgtcacaagttctacctccagggccgctgcccctacggctctcgctgccacttcatccacaaccctagcgaagacctggcggccccgggccaccctcctgtgcttcgccagagcatcagcttctccggcctgccctctggccgccggacctcaccaccaccaccaggcctggccggcccttccctgtcctccagctccttctcgccctccagctccccaccaccacctggggaccttccactgtcaccctctgccttctctgctgcccctggcacccccctggctcgaagagaccccaccccagtctgttgcccctcctgccgaagggccactcctatcagcgtctgggggcccttgggtggcctggttcggaccccctctgtacagtccctgggatccgaccctgatgaatatgccagcagcggcagcagcctggggggctctgactctcccgtcttcgaggcgggagtttttgcaccaccccagcccgtggcagccccccggcgactccccatcttcaatcgcatctctgtttctgagtgacaaagtgactgcccggtcagatcagctggatctcagcggggagccacgtctcttgcactgtggtctctgcatggaccccagggctgtggggacttgggggacagtaatcaagtaatccccttttccagaatgcattaacccactcccctgacctcacgctggggcaggtccccaagtgtgcaagctcagtattcatgatggtgggggatggagtgtcttccgaggttcttgggggaaaaaaaattgtagcatatttaagggaggcaatgaaccctctcccccacctcttccctgcccaaatctgtctcctagaatcttatgtgctgtgaataataggccttcactgcccctccagtttttatagacctgaggttccagtgtctcctggtaactggaacctctcctgagggggaatcctggtgctcaaattaccctccaaaagcaagtgaccaaagccgttgccaaaccccacccataaatcaatgggccctttatttatgacgactttatttattctaatatgattttatagtatttatatatattgggtcgtctgcttcccttgtatttttcttcctttttttgtaatattgaaaacgacgatataattattataagtagactataatatatttagtaatatatattattaccttaaaagtctatttttgtgttttgggcatttttaaataaa

SEQ ID NO: 170 - DNA, 423 bp, Homo sapiens
  misc_feature (1)..(423): "n" represents an unknown nucleotide
acactcagannntttatttaaaaatgcccaaaacacaaaaatagacttttaaggtaataatatatattactaaatatattatagtctacttataataattatatcgtcgttttcaatattacaaaaaaaggaagaaaaatacaagggaagcagacgacccaatatatataaatactataaaatcatattaggaataaataaagtcgtcataaataaagggcccattgatttatggggtgggggtttgggcaacggctttggcctacttgcttttgggaggggtaatttgaggcaccngggggttccccctcagggagagggttcccagttccngggggngacactngggaccntcagggtcttattaaacctgggagggggcagttgaggcctntttattccacagccncataggttctaggg

SEQ ID NO: 171 - DNA, 381 bp, Homo sapiens
  misc_feature (1)..(381): "n" represents an unknown nucleotide
anattcggcactaggcttttccagaatgcattaacccactcccctgacctcacgctggggcaggtccccaagtgtgcaagctcagtattcatgatggtgggggatggagtgtcttccgaggttcttgggggaaaaaaaattgtagcatatttaagggaggcaatgaaccctctcccccacctcttccctgcccaaatctgtctcctaggaatcttatgtgctgtgaataataggccttcactgcccctccagtttttataggacctgaggttccagtgtctcctgggtaactgggaacctctcctgagggggggatccggggtgntcaaatnaccctccaaaaggcaagtaggccaaagccgtttgcccaaacccccaccc

SEQ ID NO: 172 - DNA, 398 bp, Homo sapiens
tttacactcagattgtttatttaaaaatgcccaaaacacaaaaatagacttttaaggtaataatatatattactaaatatattatagtctacttataataattatatcgtcgttttcaatattacaaaaaggaagaaaaatacaagggaagcagacgacccaatatatataaatactataaaatcatattagaataaataaagtcgtcataaataaagggcccattgatttatgggtggggtttggcaacggctttggctacttgcttttggagggtaatttgagcaccaggattccccctcaggaggaggttccagttaccaggagacactggaacctccaggtcctataaaaactgggaggggcagtgaaggcctattattcacagcacataagat

SEQ ID NO: 173 - DNA, 577 bp, Homo sapiens
gacaaagtgactgcccggtcagatcagctggatctcagcggggagcacgtctcttgcactgtggtctctgcatggaccccagggctgtggggacttgggggacagtaatcaagtaatccccttttccagaatgcattaacccactcccctgacctcacgctggggcaggtccccagagtgtgcaagctcagtattcatgatggtgggggatggagtgtcttccgaggttcttgggggaaaaaaaattgtagcatatttaagggaggcaatgaaccctctcccccacctcttccctgcccaaatctgtctcctagaatcttatgtgctgtgaataataggccttcactgcccctccagtttttatagacctgaggttccagtgtctcctggtaactggaacctctcctgagggggaatcctggtgctcaaattaccctccaaaagcaagtagccaaagccgttgcaaaccccacccataaatcaatgggccctttatttatgacgactttagttaatctaatatgattttatagtattagtatatatgggtcgtctgctccttgtattttcgtctttt

SEQ ID NO: 174 - DNA, 527 bp, Homo sapiens
  misc_feature (1)..(527): "n" represents an unknown nucleotide
ttttttttcccatgaaatctttatcatccagcaaatatacctgtgtgtttttttaatccattcaagtatcttcaggagatatgttattacacttgcatgtaccttaattcacttcaacattgacaaaataacactgacaaacaaaacaacagaaaacacccataaacattaatgagaatttcaacaaacatgactctccagtagttgtcttaggattgttgtaagtgacattttaaattccacattctctgaaatcttcatgtaaaagacagttgtattggtgggtgcttcagacacacttacttcaggctatgactgtgggtaccttatatgttaaaataattttgtgtatccattttggcataatatgctactcgggncaaaaataccgggggcggtttgggaatgggcacatccacggaccgggggncaatggacaccaggaacctttctncttttntgttgctcacaaacagtgggggcnccttaatccccctcactggggcnggtcccttnttttcggnccc

SEQ ID NO: 175 - DNA, 448 bp, Homo sapiens
  misc_feature (1)..(448): "n" represents an unknown nucleotide
gaattccatgtcagcgttgggattctcagtatcctcacgagcatgacatgactcctgaaaatttcaagtgcaaggacctacgagaaaattactgccgaaatccagatgggtctgaatcaccctggtgttttaccactgatccaaacatccgagttggctactgctcccaaattccaaactgtgatatgtcacatggacaagattgttatcgtgggaatggcaaaaattatatgggcaacttatcccaaacaagatctggactaacatgttcaatgtgggacaagaacatgggaagacttacatcgtcatatcttctggggaaccngatgcaagtaagctgaatgagaattactgccgaaatccagatngatggatgctcatgggaccctgggtngcttacacggggaaattcccacttcatttccttggngatttatttgccctattt

SEQ ID NO: 176 - DNA, 5718 bp, Homo sapiens
ggccgagcgcgcggcctggcgcacgatacgccgagccggtctttgagcgctaacgtctttctgtctccccgcggtggtgatgacggtgaaaactgaggctgctaagggcaccctcacttactccaggatgaggggcatggtggcaattctcatcggtgagtgcaggaatcttgcgggacttctgctccaggagacgcaaagtggaaattttttgaaagtcccggatcagattagtgtgtgtggcgccgggacgttatgaagccgtctaaacgtttctttatttctcctccttctatccacagctttcatgaagcagaggaggatgggtctgaacgactttattcagaagattgccaataactcctatgcatgcaaacagtaagttcagaccggattgaggaaataactagtatagtttgaatttgccagcggtaaacattctcatcacggcgtttatcgggaaggcgaagacttcttctggggtggggatctcatttctccttaaattctaatatatttgacacattttaaacattaaagttaatttgctgatttggcttgaactggagatgtaagataaatggttcgtgttggccgaattcacgctttctccatgagcaacaatccttatttctgtatttaatggggtttattattttctttaactgactaatgtattggggtattttcagtttaaacagtgaattatcgggtagaagtcggtagagccagaaactcacttttgatgttggtgtgccccctagtggcgagctggattctaaatcgtgccctttattccctgcagccctgaagttcagtccatcttgaagatctcccaacctcaggagcctgagcttatgaatgccaacccttctcctccagtaagtttttgtatgtgccgtgcatctgtggagaactgtaagggagtcagttagtattcctacattaatggattaaaatagcatttctagaaattagtatcaaggcaggaatgcttcattatgcataacagtgatataaatatttaagtattgagtcagagtattatttttatttttttcctgggcatattttacctcaagtggttattttaaaaggcatatttcataaaaaggttttatctgtctgaaacaacatgactgtgtgcagtttccatactcatttgaaatgtgatgaaatgtagttttgaatgtttatagatgtatggtcatttgcatcagtcatttgtagatgtaacattttctacatcgtttatgttatagatgtcttcctttgaagcaatggtattaaaagaaattctttttttttttttctagccaagtccttctcagcaaatcaaccttggcccgtcgtccaatcctcatgctaaaccatctgactttcacttcttgaaagtgatcggaaagggcagttttggaaaggtaatttcaaatctgaagatcttttggtacacttccttcatgtcctcttttatattctccctggatgaggatcgaaaaatgatttttttaaattgaaatttcaggttcttctagcaagacacaaggcagaagaagtgttctatgcagtcaaagttttacagaagaaagcaatcctgaaaaagaaagaggtgagatgtgcttgatggggctggcattggcggtagacactccttgaataatcttgattctggaatgttggtgccagttgaacatgccactaaatctgaatcgtcattttcctaggagaagcatattatgtcggagcggaatgttctgttgaagaatgtgaagcaccctttcctggtgggccttcacttctctttccagactgctgacaaattgtactttgtcctagactacattaatggtggagaggtgagcaggggggatagaagtcaactcttagtgtctctgcacagcctgctttgttttagtttgagaaaaaagttttcaaagatttttggtggggagaatgttaccagaattagcatttccttcaacctgtcaggttatagttaatagattacttggggccacttcctgcagttgttcttttgctgtgtatgtcaaaactaattaaattacattgcgcaacccagaatgactttgttctgtctcctgcagttgttctaccatctccagagggaacgctgcttcctggaaccacgggctcgtttctatgctgctgaaatagccagtgccttgggctacctgcattcactgaacatcgtttataggtaagcctgagagctcttcaggctaccagttttggtataaaggagacgtagcactggctgtttcatagggccttaaaataatttgtgtttatttgcaacttggttcgctaaaaccagatcccctagcacgtgagctggcttgacttaagtgccaagggggaacagccaagtaggattgtgcctaatccagaatagatgagcagaacaagggctccttttttcttcactacacaactacagtgaacctaaatgcctctaataccttagcaattatctttaagaggatatcttatgaagtgaaattaacttgtgcaactacttttctattcacttttttacagagacttaaaaccagagaatattttgctagattcacagggacacattgtccttactgatttcggactctgcaaggagaacattgaacacaacagcacaacatccaccttctgtggcacgccggaggtaggcgctgtcttggtttggtgcctggtttacccccgccttccaagagagagatgtacaatcatgcacttaactaccaaaaagagtaaactcctctcagagacttcttaatacagttcagtgcaaataaaatacatttgctgtttgatgtagcatgagaaatcccaagtccttctgttcctttactgaaaagtagctgtttgtaagtaagatctgcatcataaaaactttctaatcctaagtaagagatatcaagtgccagcagtttcctaaatgtcagtacacataggtagccagtcaccctcaaaaagtccagcagttttatcaggaaggaatctaaagatatctatcttccaagctggctctgggtctctcagctttttcaaactaaatgtgtggtcgtgggattgcttgctttcgcaggttctaaacgctgtttccctggtctgtttttcagtatctcgcacctgaggtgcttcataagcagccttatgacaggactgtggactggtggtgcctgggagctgtcttgtatgagatgctgtatggcctggtgagtggcacattgggaaccactggaacactgcctgctccctacaatattgccttcacacagcaaaagcagctaagaggcatattggttattttatagttcataagaataatcacttacctggttcttttgtgcatttcacattttactagataggaccacattgaacctgtgtggtggtgaaaaactaccacttattaacatctaccccctaccctccacacacacacacacaaacacacacacgggttgcaaagtagacacttaaatagcaagggaaaagaaagcattgaggtggggagagtttctcaaatcgagcctaatatttattgccgtttatatctttttctctactggtaatgtgtgccatatgaaacttccaattaagtctaaagtaattttccccttctttcagccgcctttttatagccgaaacacagctgaaatgtacgacaacattctgaacaagcctctccagctgaaaccaaatattacaaattccgcaagacacctcctggagggcctcctgcagaaggacaggacaaagcggctcggggccaaggatgacttcgtgagtgatgttttcctgtcctcctgggccggccgggacgtgcactagacctccctgcccttattgaatgcacctgtctaaattaatcttgggtttcttatcaacagatggagattaagagtcatgtcttcttctccttaattaactgggatgatctcattaataagaagattactcccccttttaacccaaatgtggtgagtatctgtctctcttctaagtatagagaagccaagcgatttattttaattcagaattgtctgggggagggttggaaggaatacattggcagatgttttctccataaacctgttattttacctacatagacacatttatcaattcgaagcaccaaaaggcaacaagtgaacattattcttatgtttaactgtgtgtagccttttgagattttgtgcttgaagtgggtgattatggaagttgatataagacttaaacttggtatttaaagcctggtcaagatttccctgtcctgtgtctagtgtgagttcttgacaagagtgtttttcccttcccgtcacagagtgggcccaacgagctacggcactttgaccccgagtttaccgaagagcctgtccccaactccattggcaagtcccctgacagcgtcctcgtcacagccagcgtcaaggaagctgccgaggctttcctaggcttttcctatgcgcctcccacggactctttcctctgaaccctgttagggcttggttttaaaggattttatgtgtgtttccgaatgttttagttagccttttggtggagccgccagctgacaggacatcttacaagagaatttgcacatctctggaagcttagcaatcttattgcacactgttcgctggaattttttgaagagcacattctcctcagtgagctcatgaggttttcatttttattcttccttccaacgtggtgctatctctgaaacgagcgttagagtgccgccttagacggaggcaggagtttcgttagaaagcggacctgttctaaaaaaggtctcctgcagatctgtctgggctgtgatgacgaatattatgaaatgtgccttttctgaagagattgtgttagctccaaagcttttcctatcgcagtgtttcagttctttattttcccttgtggatatgctgtgtgaaccgtcgtgtgagtgtggtatgcctgatcacagatggattttgttataagcatcaatgtgacacttgcaggacactacaacgtgggacattgtttgtttcttccatatttggaagataaatttatgtgtagacttttttgtaagatacggttaataactaaaatttattgaaatggtcttgcaatgactcgtattcagatgcctaaagaaagcattgctgctacaaatatttctatttttagaaagggtttttatggaccaatgccccagttgtcagtcagagccgttggtgtttttcattgtttaaaatgtcacctgtaaaatgggcattatttatgtttttttttttgcattcctgataattgtatgtattgtataaagaacgtctgtacattgggttataacactagtatatttaaacttacaggcttatttgtaatgtaaaccaccattttaatgtactgtaattaacatggttataatacgtacaatccttccctcatcccatcacacaactttttttgtgtgtgataaactgattttggtttgcaataaaaccttgaaaaatatttacatatattgtgtcatgtgttattttgtatattttggttaagggggtaatcatgggttagtttaaaattgaaaaccatgaaaatcctgctgtaatttcctgcttagtggtttgctccaacagcagtggtttctgactccagggagtataggatggcttaagccaccacgtccaggcctttagcagcatt

SEQ ID NO: 177 - DNA, 226 bp, Homo sapiens
ttttttttttttttttttttttaaatatttttcaaggttttattgcaaaccaaaatcagtttatcacacacaaaaaaagttgtgtgatgggatgagggaaggattgtacgtattataaccatgttaattacagtacattaaaatggtggtttacattacaaataagcctgtaagtttaaatatactagtgttataacccaatgtacagacgttctttatacaatac

SEQ ID NO: 178 - DNA, 390 bp, Homo sapiens
aggtttcatttattcttccttccaacgtggtgctactctgaaacgagcgttagagtgccgccttagacggaggcaggagtttcgttagaaagcggacctgttctaaaaaaggtctcctgcagatctgtctgggctgtgatgacgaatattatgaaatgtgccttttctgaagagattgtgttagctccaaagcttttcctatcgcagtgtttcagttctttattttcccttgtggatatgctgtgtgaaccgtcgtgtgagtgtggtatgcctgatcacagatggattttgttataagcatcaatgtgacacttgcaggacactacaacgtgggacattgtttgtttcttccatatttggaagataaatttatgtgtagacttttttgta

SEQ ID NO: 179 - DNA, 450 bp, Homo sapiens
tttttttggtgtgtggcgtcgcgcgcgccagctatcgtcagtgcctttattgccattgggtttgtgactgttgatatagtgacgacctcaggagcaacaggtgggttaaaaacccgtggctgggcagttcttccgaggagagggaccacatgaggagccaagaaggactcagaacctgacgaacgtggcatcgatctgccgcacggaggggagggcgagcatgaccttccgccggtactgggggtccttctgcaaggggttccgctccaggtacactgtctccaggctcctggctcccttcagctcgtcgaggtcgctccagctctcaaggagattgtcgttcatccagaactcttgcagctctgttagatggctgatattttcaatctttttgattctatttgatggaatgtccaacatcgtgagtttgtttattgtctccgggccctc

SEQ ID NO: 180 - DNA, 443 bp, Homo sapiens
ggctgaccaagatcgagggtctgcagaacctggtgaacctgcgggactgtaccttagccacaatggcatcgaggtcatcgagggcctggagaacaataacaaactcacgatgttggacattgcatcaaatagaatcaaaaagattgaaaatatcagccatctaacagagctgcaagagttctggatgaacgacaatctccttgagagctggagcgacctcgacgagctgaagggagccaggagcctggagacagtgtacctggagcggaaccccttgcagaaggacccccagtaccggcggaaggtcatgctcgccctcccctccgtgcggcagatcgatgccacgttcgtcaggttctgagtccttcttggctcctcatgtggtccctctcctcggaagaactgcccagccacgggtttttaacccacctgttgctcctgag

SEQ ID NO: 181 - DNA, 393 bp, Homo sapiens
  misc_feature (1)..(393): "n" represents an unknown nucleotide
taattaatnatatttcagccatttctttttatttacagtttgtgttcaatgcaaatcaattccataagaagttactatgaatcaaagcgtaaatacacaaacacaatatacaatccaaaatagatgtacagcattctggaataaagcaagggtgttcattcacacacacagtaggcttcaaaactgttcgatctgtttgttcccatgtagttttctaaagatggaaaaaaaggactttgggtcatcaaggactactgtgggccatattaggattactgggaacatctaaggcatcaggtgtgtgaccatggcgaacaaaaggacttcgggggagtgtctatttttaaaaagggtttatggtgtgtcgagggcagttngtaaaaggntttactg

SEQ ID NO: 182 - DNA, 541 bp, Homo sapiens
  misc_feature (1)..(541): "n" represents an unknown nucleotide
aacaggtaatataaaaagcttccatgattctatttatatgtacatgagaaggaacttccaggtgttactgtaattcctcaacgtattgtttcgacagcactaatttaatgccgatatactctagatgaagttttacattgttgagctattgctgttctcttgggaactgaactcactttcctcctgaggctttggatttgacattgcatttgacctnttatgtagtaattgacatgtgccagggcaatgatgaatgagaatctacccccagatccaagcatcctgagcaactcttgattatccatattgagtcaaatggtaggcatttcctatcacctgtttccattcaacaagagcactacattcatttagctaaaacggattccaaggagtaggatttggcattgaccgcgactaatttcaaaatgcnttttttattnattaataatttttttaggacagtcntcactttgtcggcccgggccggngtgcagtgggtgcggttctcagntcagtgtaccttttggcntcccgggttcaa

SEQ ID NO: 183 - DNA, 192 bp, Homo sapiens
tactgatagatggaatttattaagcttttcacatgtgatagcacatagttttaattgcatccaaagtactaacaaaaactctagcaatcaagaatggcagcatgttattttataacaatcaacacctgtggcttttagaatttggttttcataagataatttatactgaagtaaatctagccatgcttttaa

SEQ ID NO: 184 - DNA, 331 bp, Homo sapiens
acaaaaaatattttggaataagcattgttttggtatatatggtacatattttggttgaagacaccagactgaagtaaacagctgtgcatccaatttattatagttttataagtaacaatatgtaatcaaacttctaggtgacttgagagtggaacctcctatatcattatttagcaccgtttgtgacagtaaccatttcagtgtattgtttattataccacttatatcaacttatttttcaccaggttaaaattttaatttctacaaaataacattctgaatcaagcacactgtatgttcagtaggttgaactatgaacactgtcatcaat

SEQ ID NO: 185 - DNA, 1645 bp, Homo sapiens
gtagcaaagtgacgccgagggcctgagtgctccagtagccaccgcatctggagaaccagcggttaccatggaggggatcagtatatacacttcagataactacaccgaggaaatgggctcaggggactatgactccatgaaggaaccctgtttccgtgaagaaaatgctaatttcaataaaatcttcctgcccaccatctactccatcatcttcttaactggcattgtgggcaatggattggtcatcctggtcatgggttaccagaagaaactgagaagcatgacggacaagtacaggctgcacctgtcagtggccgacctcctctttgtcatcacgcttcccttctgggcagttgatgccgtggcaaactggtactttgggaacttcctatgcaaggcagtccatgtcatctacacagtcaacctctacagcagtgtcctcatcctggccttcatcagtctggaccgctacctggccatcgtccacgccaccaacagtcagaggccaaggaagctgttggctgaaaaggtggtctatgttggcgtctggatccctgccctcctgctgactattcccgacttcatctttgccaacgtcagtgaggcagatgacagatatatctgtgaccgcttctaccccaatgacttgtgggtggttgtgttccagtttcagcacatcatggttggccttatcctgcctggtattgtcatcctgtcctgctattgcattatcatctccaagctgtcacactccaagggccaccagaagcgcaaggccctcaagaccacagtcatcctcatcctggctttcttcgcctgttggctgccttactacattgggatcagcatcgactccttcatcctcctggaaatcatcaagcaagggtgtgagtttgagaacactgtgcacaagtggatttccatcaccgaggccctagctttcttccactgttgtctgaaccccatcctctatgctttccttggagccaaatttaaaacctctgcccagcacgcactcacctctgtgagcagagggtccagcctcaagatcctctccaaaggaaagcgaggtggacattcatctgtttccactgagtctgagtcttcaagttttcactccagctaacacagatgtaaaagacttttttttatacgataaataacttttttttaagttacacatttttcagatataaaagactgaccaatattgtacagtttttattgcttgttggatttttgtcttgtgtttctttagtttttgtgaagtttaattgacttatttatataaattttttttgtttcatattgatgtgtgtctaggcaggacctgtggccaagttcttagttgctgtatgtctcgtggtaggactgtagaaaagggaactgaacattccagagcgtgtagtgaatcacgtaaagctagaaatgatccccagctgtttatgcatagataatctctccattcccgtggaacgtttttcctgttcttaagacgtgattttgctgtagaagatggcacttataaccaaagcccaaagtggtatagaaatgctggtttttcagttttcaggagtgggttgatttcagcacctacagtgtacagtcttgtattaagttgttaataaaagtacatgttaaactt

SEQ ID NO: 186 - DNA, 407 bp, Homo sapiens
  misc_feature (1)..(407): "n" represents an unknown nucleotide
ttttaagnttaacatgtacttttattaacaacttaatacaagactgtacactgtaggtgctgaaatcaacccactcctgaaaactgaaaaaccagcatttctataccactttgggctttggttataagtgccatcttctacagcaaaatcacgtcttaagaacaggaaaaacgttccacgggaatggagagattatctatgcataaacagctggggatcatttctagctttacgtgattcactacacgctctggaatgttcagttcccttttctacagtcctaccacgagacatacagcaactaaggaacttgggccacagggtcctgcctaggacacacatcaatatggaaaccaaaaaaaatttattattaaataaggtcaattaaactttcaccaaaaacttaa

SEQ ID NO: 187 - DNA, 523 bp, Homo sapiens
  misc_feature (1)..(523): "n" represents an unknown nucleotide
aggaaagcgaggtggacattcatctgtttccacttgagtctgagtcttcaagttttcactccagctaacacagatgtaaaagactttttttttatacgataaataacttttttttaagttacacatttttcagatataaaagactgaccaatattgtacagtttttattgcttgttggatttttgtcttgtgtttctttagtttttgtgaagtttaattgacttatttatataaattttttttgtttcatattgatgtgtgtctaggcaggacctgtggccaagttcttagttgctgtatgtctcgtgggtaggactgtaggaaaaggggaactgnaacattccaggagccgtgtaggtgaatcacgttaaagctaggaaatgatcccccaggctgttttatgccattaggataaatctctcccattccccgtgggaacgtttttttcccggttccttaaggacggtgaattttggctgtaggaagatgggccccttatnaccccaaagncccaaagtgggtt

SEQ ID NO: 188 - DNA, 215 bp, Homo sapiens
  misc_feature (1)..(215): "n" represents an unknown nucleotide
cacaaacccgcgcgtctcggctgcccctttgtacaccgcgccggaangggggctccgagggggcgcctcaaaccctgcctttcctttacttttactttttttttttttttctttggaagagagaagaacagagtgttcgattctgccctatttatgtttctactcgggaacaaacgttggttgtgtgtgtgtgtgttttcttgtgttggtttttt

SEQ ID NO: 189 - DNA, 103 bp, Homo sapiens
taaaaaaccaacacaagaaaacacacacacacacaaccaacgtttgttcccgagtagaaacataaatagggcagaatcgaacactctgttcttctctcttcca

SEQ ID NO: 190 - DNA, 5504 bp, Homo sapiens
aagctttttgtggcaacctgtatgaacgcggagggagaagtgccctagaccagcctccagatcgttcctactggggctgtcagcggctttagctcactgggcgctagatgggagtgtcccctccgtacccggacgaaggcggggcgcccgctggcaaagcgcattttccagcgcaagctgtttggggtgcggggctggcgagtgagggaaaacagagggtggcgcgcccaccatcagcgtctgtgcagccccacctgcgccgcgggttggtctcagccggatcctgcagccctcatcgagcaaaggctgggcgcggcgcccccactgccggggagggaagaggctgggaggacgcaacaggcccaggctgtgccgggcggggagcctgggcaggcagctgcacccccagccccagagggctggggaaggccggcccgaccagcagcaggaaagggggcgctaagtcgccttcaagcccgcacggctctcccggcctttcctcctgtcctcagagtcagctcccccgcccgggacgtcccgcgccactccgcgcctttggccctggctcaaggtcttgtgatgtgattagacaaagccgacgccttgtcctcagacactcagccctgcccggcaggccccggacgctcaagccctgtttactgagcctgggcggggagggggcggaagaaacgagcccgggctccaccggcaagactgccgcggcggccgcccgcgtggccacccccacccccaccgcgactccacgtgcagtcgggctggagccgccaccgactggacgcaggccccgagcccccgcctcctggccggggcaccctttgcaaacccgccgggccgcggggctggttgcgaatatctggcattttgcaattcccgcgcccagtacaaaaccgaagtggagcttaaagctccacaggtccgccgtcggagaacagggcagggaaagacacgtccagggctgcagaatcccggccacgctaaacgaccgggctctccgaccgcgcaccccggaggagaacagccgtgccttcccgccgccacccggcgcatccactggggccgagactacacgccacaccggccgcccgaccgcgggccccgcccggaggcctggagcaccctcccccggaggtaaaaaaattgcgcggccaatgggaggccgggaaggcgcctgacgtccgcgagcgggcgggcggcgttgcctggagaccccggcgggggccgagttctgtcccctcccccggcgcgcccgccccgccgcagccgcactcccgggctctatttagggcgcgcgctcggcggaggccgccgagttccagcagtccgcgagctgccgtcggctccgcggggggggcgggccgggcaccccggggcgcggaggagcgctcctcgcttctctccttcccccctgccgcactccgccggaccctcccgccggcccgcgccgctgcactcgccctctcctctcgccccccggcaaactttcggcccctccccgcccctcgcccgttattcgtcgtggctcaagcccggccacgccgccccaagggctcctcccgacctcccggcctgccgctccggccactgcgggatccagaaacatgtcgaccacacttctgtccgccttctacgatgtcgacttcttgtgcaaggtaggccagggacggggcccggccggcagcagccgttgtagttcttggactttgcctctgtccccaggttctgggggacgcccctcccgccctgcctttcaaagcgggaaagtcccggggtttgcaaaagagtgtccgacccctgagcgggaggacgccgtgtcgcggttgagtttctccactgccgaccgcggccacgctgcccggggcttcccggacagcttcgcgccgcccacctcggcagccggggcggaggatcacgtgtcgaaacccagcgcggcccacggtgggcgtcctcccctctcccgctccgtccagcaagatcttgctggttttgcgcgtgtataggtggagggtggaggcgagtcgggatccgccaagagtgggggaaaaaaaggaaaagaatcagctgggagttcctctgcggctcgccccgagtctgtcttccccttccgtttttcatcccttccccgctcccctccctttggcagacagagaaatccctggccaacctcaacctgaacaacatgctggacaagaaggcggtggggacgcctgtggccgccgcccccagctcgggcttcgcgccgggattcctccgacggcactcggccagcaacctgcatgcactcgcccaccccgcgcccagccccggcagctgctcgcccaagttcccgggcgccgctaacggcagcagctgcggcagcgcggcggccggcggtccggacctctacggcacccttaaggagccgtcggggggcggcggcacagccctgctcaacaaggagaacaaattccgggaccgctcgtttagcgagaacggcgatcgcagccagcacctcctgcacctgcagcagcagcagaaggggggcggcggctcccagatcaactccacgcgctacaagaccgagctgtgccggcccttcgaggagagcggcacgtgcaagtacggcgaaaagtgccagttcgcgcatggcttccacgagctgcgcagcctgactcgccatccgaagtacaagaccgagctgtgccgcacctttcataccatcggcttctgcccctatgggccgcgctgccacttcatccacaacgcggacgagcggcggcccgcgccgtcggggggcgcctccggggaccttcgtgcctttggcacgcgcgatgcgttgcacctgggcttcccgcgggagccgcggcccaagttgcaccacagcctcagcttctcgggcttcccgtcgggccaccatcagcccccgggcggcctcgagtcgccgctgctgctcgacagccccacgtcgcgcacgccgccgccgccctcctgctcttcggcctcgtcctgctcctcctccgcctcctcctgttcctcggcctccgcggcctccacgccctcgggcgccccgacatgctgcgcctccgcggccgctgcggccgctctgctgtacggcaccgggggcgccgaggacctgctggcgccgggggccccgtgcgcggcctgctcgtcggcctcgtgcgccaacaacgccttcgccttcggtccggagctcagcagcctcatcacgccgctcgccatccagacccacaactttgccgccgtggccgccgccgcctactaccgcagtcagcagcagcagcagcagcagggcctggcgccccccgcgcagccgccggcgccgcccagcgcgaccctccccgccggggccgccgcacctccctcgccgcccttcagcttccagctgccgcgccgcctgtccgactcgcccgtgttcgacgcgccccccagccccccggactcgctgtcggaccgcgacagctacctaagcggctccctgagctccggcagcctcagcggctctgagtctcccagcctcgaccctggccgccgcctgccaatcttcagccgcctctccatctccgacgactgaggcaagagggcgccagtgaggaggaagggaaggcggttcagagatgttggaggacacccctcgccatctcgcccttgctgggggcacgggagtggggggggtgacatgggccctaggcagtctgcaagccctaccgagcacttggactcgaactctgtgccgggaggggcccccacccctcctttttcggtttcctcttgtctttttttttttatttttattacgaagtttcattctttttgagcaaaaaagtcgaactttttctgttgaataaaatattcacaacagggcagttgtgatacgaatagaacaaaaaaaaaaaaaaaaacacttaaactttgttaggactccgatgagtttgggacttcaggaaaaatcaacccagcaccagcagctaccaaccaccattccatctcttcacttgaacagcattagttaagtccagatgtgggaacccttctcttggaagaagttcctaattgtgtctcagaccggtgtaaacaaaccagccagccgccaccttgctaaacctataagctttttaaaatccaatatattctgccaagaatatgccttgatagttagccctcagcccataggtgttttttgttttttaacagaattatatatgtctgggggtgaaaaaacccttgcattccaaagctccatactggttacttggtttcattgccaccacttagtggatgttcagtttagaaccattttgtctgctccctctggaagccttgcgcagagcttactttgtaattgttggagaataactgctgaatttttagctgttttgagtgattcgcaccactgcaccacaactcaatatgaaaactatttaacttatttattatcttgtgaaaaatatacaatgaaaattttgttcatactgtatttatcaagtatgatgaaaagcaatagatatatattcttttattatgttaaattatgattgccattattaatcggcaaaatgtggagtgtatgttcttttcacagtaatatatgccttttgtaacttcacttggttattttattgtaaatgagtacaaaattcttaatttaagagattgtatgtaatatttatttcattaatttctttccttgtttacgtaaattttgaaagattgcatgatttcttgacagaaatcgatcttgatgctgtggaagtagtttgaggaacatcctatgagttttcttagaatgtataaaggttgtagcccatccaacttcaatgaaaaaaatgaccacatactttgcaatcaggctgaaatgtggcatgcttttctaattccaactttataaactagcaaaaaagtgtttgcttattccaccagttctactgtgacatactcgagtataaagacatgtagccataacggggagtggggggggagtctccatgcctttgaagggcccgactgccttaaatcttcctcaaccaaatacgtattttattagtgattgagagaatctgaatgtaggatgggttcaactgcacaaaaggaaaagatttttaccactttttttatatagatataaagtgaagcaacccgccttagtgctgaaatatgtagtacatgaatatgccttgtttaattacagaaaattccaaaacttgtactatttttttttccatgtagaaaggcaggaatgtctcctaagctttcctggcagcagatgaatcagcggtagctttagtttgtcgtaggtacagttggagcactatatgtactctctggactactttggacagaagtaggtttttgaatgtaacaagataagtcaacttgagttgtaatatattttgggaaatcagctcactacaaattgtagactgtaaacattgtactgtaaatgttttgtagttttcccccaataaaatttttgggaaaaaagggaattc

SEQ ID NO: 191 - DNA, 424 bp, Homo sapiens
acctttttttcccaaaaattttattgggggaaaactacaaaacatttacagtacaatgtttacagtcacaatttgtagtgagctgattccccaaaatatattacaactcaagttgacttatcttgttacattcaaaaacctacttctgtccaaagtagtccagagagtacatatagtgctccaactgtacctacgtacaaactaaagctaccgctcattcatctgctgtccaggaaagcttaggagacattcctgcctttctacatggaaaaaaaaatagtacaagttttggaattttctgtaattaaacaaggcatattcatgtactacatatttcagcactaaggcggttgcttcactttatatctatataaaaaaagtggtaaaaatcttttcccctttgtgcagttgaacccatcctaca

SEQ ID NO: 192 - DNA, 454 bp, Homo sapiens
aaattttgaaagattgcatgatttcttgacagaaatcgatcttgatgctgtggaagtagtttgaggaacatcctatgagttttcttagaatgtataaaggttgtagcccatccaacttcaaagaaaaaaatgaccacatactttgcaatcaggctgaaatgtggcatgcttttctaattccaactttataaactagcaaaaaagtgtttgcttattccaccagttctactgtgacatactcgagtataaagacatgtagcaataacggggagtggggggggagtctcacagtgcctttggaagggcccgaacttgccttaaatcttcctcaaccaaataagtattttattagtgcttgagagaatctgaatgtaggatgggttcaactgcacaaaaggaaaagatttttaccactttttttatatagatataaagtgaagcaaccgccttagtg

SEQ ID NO: 193 - DNA, 4577 bp, Homo sapiens
gctacaatccatctggtctcctccagctccttctttctgcaacatggggaagaacaaactccttcatccaagtctggttcttctcctcttggtcctcctgcccacagacgcctcagtctctggaaaaccgcagtatatggttctggtcccctccctgctccacactgagaccactgagaagggctgtgtccttctgagctacctgaatgagacagtgactgtaagtgcttccttggagtctgtcaggggaaacaggagcctcttcactgacctggaggcggagaatgacgtactccactgtgtcgccttcgctgtcccaaagtcttcatccaatgaggaggtaatgttcctcactgtccaagtgaaaggaccaacccaagaatttaagaagcggaccacagtgatggttaagaacgaggacagtctggtctttgtccagacagacaaatcaatctacaaaccagggcagacagtgaaatttcgtgttgtctccatggatgaaaactttcaccccctgaatgagttgattccactagtatacattcaggatcccaaaggaaatcgcatcgcacaatggcagagtttccagttagagggtggcctcaagcaattttcttttcccctctcatcagagcccttccagggctcctacaaggtggtggtacagaagaaatcaggtggaaggacagagcaccctttcaccgtggaggaatttgttcttcccaagtttgaagtacaagtaacagtgccaaagataatcaccatcttggaagaagagatgaatgtatcagtgtgtggcctatacacatatgggaagcctgtccctggacatgtgactgtgagcatttgcagaaagtatagtgacgcttccgactgccacggtgaagattcacaggctttctgtgagaaattcagtggacagctaaacagccatggctgcttctatcagcaagtaaaaaccaaggtcttccagctgaagaggaaggagtatgaaatgaaacttcacactgaggcccagatccaagaagaaggaacagtggtggaattgactggaaggcagtccagtgaaatcacaagaaccataaccaaactctcatttgtgaaagtggactcacactttcgacagggaattcccttctttgggcaggtgcgcctagtagatgggaaaggcgtccctataccaaataaagtcatattcatcagaggaaatgaagcaaactattactccaatgctaccacggatgagcatggccttgtacagttctctatcaacaccaccaacgttatgggtacctctcttactgttagggtcaattacaaggatcgtagtccctgttacggctaccagtgggtgtcagaagaacacgaagaggcacatcacactgcttatcttgtgttctccccaagcaagagctttgtccaccttgagcccatgtctcatgaactaccctgtggccatactcagacagtccaggcacattatattctgaatggaggcaccctgctggggctgaagaagctctccttttattatctgataatggcaaagggaggcattgtccgaactgggactcatggactgcttgtgaagcaggaagacatgaagggccatttttccatctcaatccctgtgaagtcagacattgctcctgtcgctcggttgctcatctatgctgttttacctaccggggacgtgattggggattctgcaaaatatgatgttgaaaattgtctggccaacaaggtggatttgagcttcagcccatcacaaagtctcccagcctcacacgcccacctgcgagtcacagcggctcctcagtccgtctgcgccctccgtgctgtggaccaaagcgtgctgctcatgaagcctgatgctgagctctcggcgtcctcggtttacaacctgctaccagaaaaggacctcactggcttccctgggcctttgaatgaccaggacgatgaagactgcatcaatcgtcataatgtctatattaatggaatcacatatactccagtatcaagtacaaatgaaaaggatatgtacagcttcctagaggacatgggcttaaaggcattcaccaactcaaagattcgtaaacccaaaatgtgtccacagcttcaacagtatgaaatgcatggacctgaaggtctacgtgtaggtttttatgagtcagatgtaatgggaagaggccatgcacgcctggtgcatgttgaagagcctcacacggagaccgtacgaaagtacttccctgagacatggatctgggatttggtggtggtaaactcagcaggggtggctgaggtaggagtaacagtccctgacaccatcaccgagtggaaggcaggggccttctgcctgtctgaagatgctggacttggtatctcttccactgcctctctccgagccttccagcccttctttgtggagcttacaatgccttactctgtgattcgtggagaggccttcacactcaaggccacggtcctaaactaccttcccaaatgcatccgggtcagtgtgcagctggaagcctctcccgccttccttgctgtcccagtggagaaggaacaagcgcctcactgcatctgtgcaaacgggcggcaaactgtgtcctgggcagtaaccccaaagtcattaggaaatgtgaatttcactgtgagcgcagaggcactagagtctcaagagctgtgtgggactgaggtgccttcagttcctgaacacggaaggaaagacacagtcatcaagcctctgttggttgaacctgaaggactagagaaggaaacaacattcaactccctactttgtccatcaggtggtgaggtttctgaagaattatccctgaaactgccaccaaatgtggtagaagaatctgcccgagcttctgtctcagttttgggagacatattaggctctgccatgcaaaacacacaaaatcttctccagatgccctatggctgtggagagcagaatatggtcctctttgctcctaacatctatgtactggattatctaaatgaaacacagcagcttactccagaggtcaagtccaaggccattggctatctcaacactggttaccagagacagttgaactacaaacactatgatggctcctacagcacctttggggagcgatatggcaggaaccagggcaacacctggctcacagcctttgttctgaagacttttgcccaagctcgagcctacatcttcatcgatgaagcacacattacccaagccctcatatggctctcccagaggcagaaggacaatggctgtttcaggagctctgggtcactgctcaacaatgccataaagggaggagtagaagatgaagtgaccctctccgcctatatcaccatcgcccttctggagattcctctcacagtcactcaccctgttgtccgcaatgccctgttttgcctggagtcagcctggaagacagcacaagaaggggaccatggcagccatgtatataccaaagcactgctggcctatgcttttgccctggcaggtaaccaggacaagaggaaggaagtactcaagtcacttaatgaggaagctgtgaagaaagacaactctgtccattgggagcgccctcagaaacccaaggcaccagtggggcatttttacgaaccccaggctccctctgctgaggtggagatgacatcctatgtgctcctcgcttatctcacggcccagccagccccaacctcggaggacctgacctctgcaaccaacatcgtgaagtggatcacgaagcagcagaatgcccagggcggtttctcctccacccaggacacagtggtggctctccatgctctgtccaaatatggagccgccacatttaccaggactgggaaggctgcacaggtgactatccagtcttcagggacattttccagcaaattccaagtggacaacaacaatcgcctgttactgcagcaggtctcattgccagagctgcctggggaatacagcatgaaagtgacaggagaaggatgtgtctacctccagacctccttgaaatacaatattctcccagaaaaggaagagttcccctttgctttaggagtgcagactctgcctcaaacttgtgatgaacccaaagcccacaccagcttccaaatctccctaagtgtcagttacacagggagccgctctgcctccaacatggcgatcgttgatgtgaagatggtctctggcttcattcccctgaagccaacagtgaaaatgcttgaaagatctaaccatgtgagccggacagaagtcagcagcaaccatgtcttgatttaccttgataaggtgtcaaatcagacactgagcttgttcttcacggttctgcaagatgtcccagtaagagatctcaaaccagccatagtgaaagtctatgattactacgagacggatgagtttgcaatcgctgagtacaatgctccttgcagcaaagatcttggaaatgcttgaagaccacaaggctgaaaagtgctttgctggagtcctgttctctgagctccacagaagacacgtgtttttgtatctttaaagacttgatgaataaacactttttctggtc

SEQ ID NO: 194 - DNA, 426 bp, Homo sapiens
  misc_feature (1)..(426): "n" represents an unknown nucleotide
gancagaaaaagtgtttattcatcaagtctttaaagatacnaaaanacgtgtcttctgtggagctctgagaacaggactccagcaaagcacttttcagccntgtggtcntcanagcatttccaagatctttgctgcaaggngcattgtactcagcaattgcaaactcatccgtctcntagtaatcatagactttcactatggctggtttcagatctcttactgggacatcttgcagaaccgtgaagaacaagctcngtgtctgatttgacaccttatcaaggtanaatcnagacatggttgctgctgacttctgtccggctcacatggttagntctttcaagcattttcactgttggcttcnggggaattgnagccagngaccatcttcacatcnancgatcgccatgttggcggcagagcgcctc

SEQ ID NO: 195 - DNA, 408 bp, Homo sapiens
  misc_feature (1)..(408): "n" represents an unknown nucleotide
cgctctgctccaacatggcgatcgttgatgtgaagatggtctctggcttcattcccctgaagccaacagtgaaaatgcttgaaagatctaaccatgtgagccggacagaagtcagcagcaaccatgtcttgatttaccttgataaggtgtcaaatcagacactgagcttgttcttcacnggttctgcaagatgtcccagtaagagatctgaaaccagccatagtgaaagtctatgattactacgagacggatgagtttgcaattgctgagtacaatgctccttgcagcaaagatcttggaaatgcttgaagaccacaaggctgaaaagtgctttgctgggagtcctgttctcagagctccacagaagacacgtgtttttgtatctttaaaagacttgatgaataaaca

SEQ ID NO: 196 - DNA, 229 bp, Homo sapiens
gacgtacagtataattaagactttaatctgaaatttaaagtagttttaattctgaagaagttacatcctctgtattatttacatgcaacaaaataaaagtggattaatatagtaatgccatggtaacagtagagcagcattgtcagcattcactaaaccaaagtcagtcaaatgtgttaaaacatccaaagttgccttcatgcataagacatagctctattggtcgacg

SEQ ID NO: 197 - DNA, 1659 bp, Homo sapiens
atggtggccaggctcgggctgtggctgctgctgctggcactgctcctacccacgcagatttattccagtgaaacaacaactggaacttcaagtaactcctcccagagtacttccaacactgggttggccccaaatccaactaatgccaccaccaaggcggctggtggtgccctgcagtcaacagccagtctcttcgtggtctcactctctcttctgcatctctactcttaagagactcaggccaagaaacgtcttctaaacttccccatcttctaaacccaatccaaatggcgtctggaagtccaatgtggcaaggaaaaacaggtcttcatcgaatctactaattccacaccttttattgacacagaaaatgttgagaatcccaaatttgattgatttgaagaacatgtgagaggtttgactagatgatggatgccaatattaaatctgctggagtttcatgtacaagatgaaggagaggcaacatccaaaatagttaagacatgatttccttgaatgtggcttgagaaatatggacacttaatactaccttgaaaataagaatagaaataaaggatgtgattgtggaatggagattcagttttcatttggttcattaattctataaggccataaaacaggtaatataaaaagcttccatgattctatttatatgtacatgagaaggaacttccaggtgttactgtaattcctcaacgtattgtttcggcagcacttatttaatgccgatatactctagatgaagttttacattgttgagctatcgctgttctcttgggaactgaactcactttcctcctgaggctttggatttgacattgcagttgaccttttatgtagtaattgacatgtgccagggcaatgatgaatgagaatctaccccagatccaagcagcctgagcaactcttgattatccatattgagtcaaatggtaggcatttcctatcacctatttccattcaacaagagcactacattcatttagctaaacggattccaaagagtagaattgcattgaccacgactaatttcaaaatgctttttattattattattttttagacagtctcactttgtcgcccaggctggagtgcagtggtgtgatctcagatcagtgtaccatttgcctcccgggctcaagcgattctcctgcctcagcctcccaagtagctgggatcacaggcacctgccaccatgcccggctaatttttgtaattttagtagagacagggtttcaccatgttgcccaggctggtttcgaactcctgacctcaggtgatccacctgcctcggcctcccaaagtgctgggattacaggcttgagcccccgcgcccagccatcaaaatgctttttatttctgcatatgttgaatactttttacaattaaaaaaaagatctgttttgaaggcaaaattgcaaatcttgaaattaagaaggaaaatgtaaaggagtcaaaactacaaatcaagtatttgggaagtgaagactggaagctaatttgcaaaattcacaaacttttatactctttctgtatatacttttttttctttaaaaaacaactatggatcagaatagccacatttggaatactttttgttatcagtcaatatttttagatagttagaacctggtccta

SEQ ID NO: 198 - DNA, 466 bp, Homo sapiens
  misc_feature (1)..(466): "n" represents an unknown nucleotide
tgganttgacattgcatnngaccntttatgtagtaattgacatgtgccagggcaatgatgaatgagantctacccccagatccaagcatccngagcaactctngattatccatatngagncaaatggtaggcatttnctatcacctgtttccattcaacaagagcactacattcatttagctaaacggattccaangagtaganttgcattgaccgcgactaatttcaaaatgctttttattattattantttttagacagtctcactttgtcgcccaggccggagtgcagtggtgcgatctcagatcagttgtaccatttgcctcccgggctncaagcgatttctcctngcctcagcctcccaagtagctggggattgacagggcacctggccaccatgncccgggtaattttttngttaatttttaggtaggaggacagggggtttnaccatgtttncccaggg

SEQ ID NO: 199 - DNA, 3029 bp, Homo sapiens
gcggccgcgtcgacgaaatgtctggatttggactaaagaaaaaaggaaaggctagcagtcatccaacagaatcatgagacagactttgccttgtatctacttttgggggggccttttgccctttgggatgctgtgtgcatcctccaccaccaagtgcactgttagccatgaagttgctgactgcagccacctgaagttgactcaggtacccgatgatctacccacaaacataacagtgttgaaccttacccataatcaactcagaagattaccagccgccaacttcacaaggtatagccagctaactagcttggatgtaggatttaacaccatctcaaaactggagccagaattgtgccagaaacttcccatgttaaaagttttgaacctccagcacaatgagctatctcaactttctgataaaacctttgccttctgcacgaatttgactgaactccatctcatgtccaactcaatccagaaaattaaaaataatccctttgtcaagcagaagaatttaatcacattagatctgtctcataatggcttgtcatctacaaaattaggaactcaggttcagctggaaaatctccaagagcttctattatcaaacaataaaattcaagcgctaaaaagtgaagaactggatatctttgccaattcatctttaaaaaaattagagttgtcatcgaatcaaattaaagagttttctccagggtgttttcacgcaattggaagattatttggcctctttctgaacaatgtccagctgggtcccagccttacagagaagctatgtttggaattagcaaacacaagcattcggaatctgtctctgagtaacagccagctgtccaccaccagcaatacaactttcttgggactaaagtggacaaatctcactatgctcgatctttcctacaacaacttaaatgtggttggtaacgattcctttgcttggcttccacaactagaatatttcttcctagagtataataatatacagcatttgttttctcactctttgcacgggcttttcaatgtgaggtacctgaatttgaaacggtcttttactaaacaaagtatttcccttgcctcactccccaagattgatgatttttcttttcagtggctaaaatgtttggagcaccttaacatggaagataatgatattccaggcataaaaagcaatatgttcacaggattgataaacctgaaatacttaagtctatccaactcctttacaagtttgcgaactttgacaaatgaaacatttgtatcacttgctcattctcccttacacatactcaacctaaccaagaataaaatctcaaaaatagagagtgatgctttctcttggttgggccacctagaagtacttgacctgggccttaatgaaattgggcaagaactcacaggccaggaatggagaggtctagaaaatattttcgaaatctatctttcctacaacaagtacctgcagctgactaggaactcctttgccttggtcccaagccttcaacgactgatgctccgaagggtggcccttaaaaatgtggatagctctccttcaccattccagcctcttcgtaacttgaccattctggatctaagcaacaacaacatagccaacataaatgatgacatgttggagggtcttgagaaactagaaattctcgatttgcagcataacaacttagcacggctctggaaacacgcaaaccctggtggtcccatttatttcctaaagggtctgtctcacctccacatccttaacttggagtccaacggctttgacgagatcccagttgaggtcttcaaggatttatttgaactaaagatcatcgatttaggattgaataatttaaacacacttccagcatctgtctttaataatcaggtgtctctaaagtcattgaaccttcagaagaatctcataacatccgttgagaagaaggttttcgggccagctttcaggaacctgactgagttagatatgcgctttaatccctttgattgcacgtgtgaaagtattgcctggtttgttaattggattaacgagacccataccaacatccctgagctgtcaagccactacctttgcaacactccacctcactatcatgggttcccagtgagactttttgatacatcatcttgcaaagacagtgccccctttgaactctttttcatgatcaataccagtatcctgttgatttttatctttattgtacttctcatccactttgagggctggaggatatctttttattggaatgtttcagtacatcgagttcttggtttcaaagaaatagacagacagacagaacagtttgaatatgcagcatatataattcatgcctataaagataaggattgggtctgggaacatttctcttcaatggaaaaggaagaccaatctctcaaattttgtctggaagaaagggactttgaggcgggtgtttttgaactagaagcaattgttaacagcatcaaaagaagcagaaaaattatttttgttataacacaccatctattaaaagacccattatgcaaaagattcaaggtacatcatgcagttcaacaagctattgaacaaaatctggattccattatattggttttccttgaggagattccagattataaactgaaccatgcactctgtttgcgaagaggaatgtttaaatctcactgcatcttgaactggccagttcagaaagaacggataggtgcctttcgtcataaattgcaagtagcacttggatccaaaaactctgtacattaaatttatttaaatattcaattagcaaaggagaaactttctcaatttaaaaagttctatggcaaatttaagttttccataaaggtgttataatttgtttattcatatttgtaaatgattatattctatcacaattacatctcttctaggaaaatgtgtctccttatttcaggcctatttttgacaattgacttaattttacccaaaataaaacatataagcacgcaaaaaaaaaaaaaaaaaa

SEQ ID NO: 200 - DNA, 366 bp, Homo sapiens
  misc_feature (1)..(366): "n" represents an unknown nucleotide
acgtgcttaannntttttattttgggtaaaattaagtcaattgtcaaaaataggcctgaaataaggagacacattttcctagaagagatgtaattgtgatagaatataatcatttacaaatatgaataaacaaattataacacctttatggaaaacttaaatttgccatagaactttttaaattgagaaagtttctcctttgctaattgaatatttaaataaatttaatgtacagagtttttgggatccaaggtgctacttgcaatttatgacggaaagggcacctatccgttctttctgaactgggccagttcaaggatgcnggtgaggatttaaacattcctcttcggcaaacagggtgcctgg

SEQ ID NO: 201 - DNA, 409 bp, Homo sapiens
gaaagggactttgaggcgggtgtttttgaactagaagcaattgttaacagcatcaaaagaagcagaaaaattatttttgttataacacaccatctattaaaagacccattatgcaaaagattcaaggtacatcatgcagttcaacaagctattgaacaaaatctggattccattatattggttttccttgaggagattccagattataaactgaaccatgcactctgtttgcgaagaggaatgtttaaatctcactgcatcttgaactggccagttcagaaagaacggataggtgcctttcgtcataaattgcaagtagcacttgggatccaaaaactctgttacatttaaatttatttaaatatttcaattaggcaaagggggaaactttcttcatttttaaaaagtt

SEQ ID NO: 202 - DNA, 534 bp, Homo sapiens
gcataagcaatagagtaaatgcatgagtaaatatcttgagtatcccataaaccttaatgttaaagtcatattgtaaatctctgacttcttattaccaaggacactctatctgttgcctcttactcttgacagatcttggtctcaacaataaattcgttggggaagtgtctaatcttccagcatttatcaatggcacgtttgttgaaacccagcaagaggtctctgcgacgaaggcggaaggactttctgttattgcaaagttggtaaataaagatgccaaggttactaacatcacgaatttcctccacagcaactaggtcttctcgaaccacataagtttgaggcagatatctgccactcgccagtttgccaaagagctctaccagatttttttggaggcataacaatagaagtattgaggggcatcagatagcagttccccagcaacaagtccaggtaagcagtcattcccttttacaagtcatgaataattgctgcagggtcactatcagagaaactggtgacaggcacatc

SEQ ID NO: 203 - DNA, 306 bp, Homo sapiens
  misc_feature (1)..(306): "n" represents an unknown nucleotide
ttttttttttttcaatctggaacacaaaagtttattagaataaaaatacacatacggtatcaacactaaaattatttcacatcgcatttaggttttacctccattagtttttnttaatgcttataaagnctatgctctaaataatttgcacatttgtaaacaaatcttagatgaccaaagatgcagtgtatctatcagcatattgaatatcaaancttaaggatgggaactgatagcgaaatccaattacactaaacattcctaaatttttgggaaagagaggaaaaagnattaanataattcact

SEQ ID NO: 204 - DNA, 493 bp, Homo sapiens
  misc_feature (1)..(493): "n" represents an unknown nucleotide
gattatcgaggctcccatggcatggcgttcacgttctttgagtaccgagcgtacaggtcaattatcaaagactacttccaccgtggcgccaagtggacaacagctcctaagcccacaatggctgatgagctttataaccaggattatcccatccactctgtagaagacagacacaaattggctgctcagggaaaatttgtgacaactgagtttgagccatgctttgatgctgctgacttcattcgagctggaagagatatttttgcacagagaagccaggttacaaactacctaggcattgaatggatgcgtaggcatctttgctccagactacagagtgcatatcatctcctttaaagatcccaatcccatggcatattgatgctaccttcaacatcattgggaccgggnattgtggntttcccaacccttgaaccgaccctgttcaccagattgatcnttttcaaggaaggcgggttgggattttccntta

SEQ ID NO: 205 - DNA, 996 bp, Homo sapiens
gaattccggcccccctctaagatactgatggctctgcagaggacccattcattgcttctgcttttgctgctgaccctgctggggctggggctggtccagccctcctatggccaggatggcatgtaccagcgattcctgcggcaacacgtgcaccctgaggagacaggtggcagtgatcgctactgcaacttgatgatgcaaagacggaagatgactttgtatcactgcaagcgcttcaacaccttcatccatgaagatatctggaacattcgtagtatctgcagcaccaccaatatccaatgcaagaacggcaagatgaactgccatgagggtgtagtgaaggtcacagattgcagggacacaggaagttccagggcacccaactgcagatatcgggccatagcgagcactagacgtgttgtcattgcctgtgagggtaacccacaggtgcctgtgcactttgacggttagatgccaccatgtagggattatcgcgagtggttgaccttacacttactccttaaatagcagtgagtaatgcatttgagctgtcccaggctctgtctcctcagctcatttcctactctttttctctatataactcattctattaaatacattgcaccaaagagatatggagacataaacctgtaatgaatgaggctgggcttttctgtaataagcttccttttataatactggtcagcttagtctctcagatcctatcctgtggaatttagttattatgtgtatttatgtagtatttcaaacatttcaaaatgctttcatctatgtttatcacattttaataccacagacttataatgatgtcactacatatagaagctcaaagttaagggatttgctgaagactgtaaagttaatggaagaattgagacaaaaatccagtgtagctggccacttatccagggctttttctacttcatcacaaggaatgttttgaaagtgtctgctttttttatccttccggaattc

SEQ ID NO: 206 - DNA, 444 bp, Homo sapiens
  misc_feature (1)..(444): "n" represents an unknown nucleotide
tntgggtggttttttttttaccttcggtttaggncctttattacaaggaaaacataaaaaatctttcaatcagtaagagcacataagtcttaatgatctagtacattttttagtactttgacttactagggtgattcaaagtttcaggaaaaagaaaattcccagtatcattttcttaatcttattaaacccaaacataagaatgccaaaaaatacagagctcacattttgctggcatacatttccaaatttttaatgcctccctgacaggngaattttaaggntaaaaaaagcagacactttcaaaacattccttgtgatgaaggtaggaaaaagccctggggntaagtgggcccagcctacactgggatttttggtcctcaattcttcccattaactttacagtcttcaggcaaatcccttaactttgaggcttctatatgt

SEQ ID NO: 207 - DNA, 452 bp, Homo sapiens
  misc_feature (1)..(452): "n" represents an unknown nucleotide
ccaggctctgtctcctcagctcatttcctactctttttctctatataactcattctattaaatacattgcaccaaagagatatggagacataaacctgtaatgaatgaggctgggcttttctgtaataagcttccttttataatactggtcagcttagctctctcagatcctatcctgtggaatttagttattatgtgtatttatgtagtatttcaaacatttcaaaatgctttcatctatgtttatcacattttaataccacaggcacttatnaatggatgtcactacatataggaaggctccaaagttaagggggtttgctggangacttgtaaagttaatggggaggaatttgaggncaaaattcccgtgtaggctgggccacttatnccggggctttttcctacttccatcacagggatgttttggaagggtctgcttttttnatcct

SEQ ID NO: 208 - DNA, 9534 bp, Homo sapiens
cagcgactcctctggctcccgagaagtggatccggtcgcggccactacgatgccgggagccgccggggtcctcctccttctgctgctctccggaggcctcgggggcgtacaggcgcagcggccgcagcagcagcggcagtcacaggcacatcagcaaagaggtttattccctgctgtcctgaatcttgcttctaatgctcttatcacgaccaatgcaacatgtggagaaaaaggacctgaaatgtactgcaaattggtagaacatgtccctgggcagcctgtgaggaacccgcagtgtcgaatctgcaatcaaaacagcagcaatccaaaccagagacacccgattacaaatgctattgatggaaagaacacttggtggcagagtcccagtattaagaatggaatcgaataccattatgtgacaattacactggatttacagcaggtgttccagatcgcgtatgtgattgtgaaggcagctaactccccccggcctggaaactggattttggaacgctctcttgatgatgttgaatacaagccctggcagtatcatgctgtgacagacacggagtgcctaacgctttacaatatttatccccgcactgggccaccgtcatatgccaaagatgatgaggtcatctgcacttcattttactccaagatacaccccttagaaaatggagagattcacatctctttaatcaatgggagaccaagtgccgatgatccttctccagaactgctagaatttacctccgctcgctatattcgcctgagatttcagaggatccgcacactgaatgctgacttgatgatgtttgctcacaaagacccaagagaaattgaccccattgtcaccagaagatattactactcggtcaaggatatttcagttggagggatgtgcatctgctatggtcatgccagggcttgtccacttgatccagcgacaaataaatctcgctgtgagtgtgagcataacacatgtggcgatagctgtgatcagtgctgtccaggattccatcagaaaccctggagagctggaacttttctaactaaaactgaatgtgaagcatgcaattgtcatggaaaagctgaagaatgctattatgatgaaaatgttgccagaagaaatctgagtttgaatatacgtggaaagtacattggagggggtgtctgcattaattgtacccaaaacactgctggtataaactgcgagacatgtacagatggcttcttcagacccaaaggggtatctccaaattatccaaggccatgccagccatgtcattgcgatccaattggttccttaaatgaagtctgtgtcaaggatgagaaacatgctcgacgaggtttggcacctggatcctgtcattgcaaaactggttttggaggtgtgagctgtgatcggtgtgccaggggctacactggctacccggactgcaaagcctgtaactgcagtgggttagggagcaaaaatgaggatccttgttttggcccctgtatctgcaaggaaaatgttgaaggaggagactgtagtcgttgcaaatccggcttcttcaatttgcaagaggataattggaaaggctgcgatgagtgtttctgttcaggggtttcaaacagatgtcagagttcctactggacctatggcaaaatacaagatatgagtggctggtatctgactgaccttcctggccgcattcgagtggctccccagcaggacgacttggactcacctcagcagatcagcatcagtaacgcggaggcccggcaagccctgccgcacagctactactggagcgcgccggctccctatctgggaaacaaactcccagcagtaggaggacagttgacatttaccatatcatatgaccttgaagaagaggaagaagatacagaacgtgttctccagcttatgattatcttagagggtaatgacttgagcatcagcacagcccaagatgaggtgtacctgcacccatctgaagaacatactaatgtattgttacttaaagaagaatcatttaccatacatggcacacattttccagtccgtagaaaggaatttatgacagtgcttgcgaatttgaagagagtcctcctacaaatcacatacagctttgggatggatgccatcttcaggttgagctctgttaaccttgaatccgctgtctcctatcctactgatggaagcattgcagcagctgtagaagtgtgtcagtgcccaccagggtatactggctcctcttgtgaatcttgttggcctaggcacaggcgagttaacggcactatttttggtggcatctgtgagccatgtcagtgctttggtcatgcggagtcctgtgatgacgtcactggagaatgcctgaactgtaaggatcacacaggtggcccatattgtgataaatgtcttcctggtttctatggcgagcctactaaaggaacctctgaagactgtcaaccctgtgcctgtccactcaatatcccatccaataactttagcccaacgtgccatttagaccggagtcttggattgatctgtgatggatgccctgtcgggtacacaggaccacgctgtgagaggtgtgcagaaggctattttggacaaccctctgtacctggaggatcatgtcagccatgccaatgcaatgacaaccttgacttctccatccctggcagctgtgacagcttgtctggctcctgtctgatatgtaaaccaggtacaacaggccggtactgtgagctctgtgctgatggatattttggagatgcagttgatgcgaagaactgtcagccctgtcgctgtaatgccggtggctctttctctgaggtttgccacagtcaaactggacagtgtgagtgcagagccaacgttcagggtcagagatgtgacaaatgcaaggctgggacctttggcctacaatcagcaaggggctgtgttccctgcaactgcaattcttttgggtctaagtcattcgactgtgaagagagtggacaatgttggtgccaacctggagtcacagggaagaaatgtgaccgctgtgcccacggctatttcaacttccaagaaggaggctgcacagcttgtgaatgttctcatctgggtaataattgtgacccaaagactgggcgatgcatttgcccacccaataccattggagagaaatgttctaaatgtgcacccaatacctggggccacagcattaccactggttgtaaggcttgtaactgcagcacagtgggatccttggatttccaatgcaatgtaaatacaggccaatgcaactgtcatccaaaattctctggtgcaaaatgtacagagtgcagtcgaggtcactggaactaccctcgctgcaatctctgtgactgcttcctccctgggacagatgccacaacctgtgattcagagactaaaaaatgctcctgtagtgatcaaactgggcagtgcacttgtaaggtgaatgtggaaggcatccactgtgacagatgccggcctggcaaattcggactcgatgccaagaatccacttggctgcagcagctgctattgcttcggcactactacccagtgctctgaagcaaaaggactgatccggacgtgggtgactctgaaggctgagcagaccattctacccctggtagatgaggctctgcagcacacgaccaccaagggcattgtttttcaacatccagagattgttgcccacatggacctgatgagagaagatctccatttggaacctttttattggaaacttccagaacaatttgaaggaaagaagttgatggcctatgggggcaaactcaagtatgcaatctatttcgaggctcgggaagaaacaggtttctctacatataatcctcaagtgatcattcgaggtgggacacctactcatgctagaattatcgtcaggcatatggctgctcctctgattggccaattgacaaggcatgaaattgaaatgacagagaaagaatggaaatattatggggatgatcctcgagtccatagaactgtgacccgagaagacttcttggatatactatatgatattcattacattcttatcaaagctacttatggaaatttcatgcgacaaagcaggatttctgaaatctcaatggaggtagctgaacaaggacgtggaacaacaatgactcctccagctgacttgattgaaaaatgtgattgtcccctgggctattctggcctgtcctgtgaggcatgcttgccgggattttatcgactgcgttctcaaccaggtggccgcacccctggaccaaccctgggcacctgtgttccatgtcaatgtaatggacacagcagcctgtgtgaccctgaaacatcgatatgccagaattgtcaacatcacactgctggtgacttctgtgaacgatgtgctcttggatactatggaattgtcaagggattgccaaatgactgtcagcaatgtgcctgccctctgatttcttccagtaacaatttcagcccctcttgtgtcgcagaaggacttgacgactaccgctgcacggcttgtccacggggatatgaaggccagtactgtgaaaggtgtgcccctggctatactggcagtccaggcaaccctggaggctcctgccaagaatgtgagtgtgatccctatggctcactgcctgtgccctgtgaccctgtcacaggattctgcacgtgccgacctggagccacgggaaggaagtgtgacggctgcaagcactggcatgcacgcgagggctgggagtgtgttttttgtggagatgagtgcactggccttcttctcggtgacttggctcgcctggagcagatggtcatgagcatcaacctcactggtccgctgcctgcgccatataaaatgctgtatggtcttgaaaatatgactcaggagctaaagcacttgctgtcacctcagcgggccccagagaggcttattcagctggcagagggcaatctgaatacactcgtgaccgaaatgaacgagctgctgaccagggctaccaaagtgacagcagatggcgagcagaccggacaggatgctgagaggaccaacacaagagcaaagtccctgggagaattcattaaggagcttgcccgggatgcagaagctgtaaatgaaaaagctataaaactaaatgaaactctaggaactcgagacgaggcctttgagagaaatttggaagggcttcagaaagagattgaccagatgattaaagaactgaggaggaaaaatctagagacacaaaaggaaattgctgaagatgagttggtagctgcagaagcccttctgaaaaaagtgaagaagctgtttggagagtcccggggggaaaatgaagaaatggagaaggatctccgggaaaaactggctgactacaaaaacaaagttgatgatgcttgggaccttttgagagaagccacagataaaatcagagaagctaatcgcctatttgcagtaaatcagaaaaacatgactgcattggagaaaaagaaggaggctgttgagagcggcaaacgacaaattgagaacactttaaaagaaggcaatgacatactcgatgaagccaaccgtcttgcagatgaaatcaactccatcatagactatgttgaagacatccaaactaaattgccacctatgtctgaggagcttaatgataaaatagatgacctctcccaagaaataaaggacaggaagcttgctgagaaggtgtcccaggctgagagccacgcagctcagttgaatgactcatctgctgtccttgatggaatccttgatgaggctaaaaacatctccttcaatgccactgcagccttcaaagcttacagcaatattaaggactatattgatgaagctgagaaagttgccaaagaagccaaagatcttgcacatgaagctacaaaactggcaacaggtcctcggggtttattaaaggaagatgccaaaggctgtcttcagaaaagcttcaggattcttaacgaagccaagaagttagcaaatgatgtaaaagaaaatgaagaccatctaaatggcttaaaaaccaggatagaaaatgctgatgctagaaatggggatctcttgagaactttgaatgacactttgggaaagttatcagctattccaaatgatacagctgctaaactgcaagctgttaaggacaaagccagacaagccaacgacacagctaaagatgtactggcacagattacagagctccaccagaacctcgatggcctgaagaagaattacaataaactagcagacagcgtcgccaaaacgaatgctgtggttaaagatccttccaagaacaaaatcattgccgatgcagatgccactgtcaaaaatttagaacaggaagctgaccggctaatagataaactcaaacccatcaaggaacttgaggataacctaaagaaaaacatctctgagataaaggaattgataaaccaagctcggaaacaagccaattctatcaaagtatctgtgtcttcaggaggtgactgcattcgaacatacaaaccagaaatcaagaaaggaagttacaataatattgttgtcaacgtaaagacagctgttgctgataacctcctcttttatcttggaagtgccaaatttattgactttctggctatagaaatgcgtaaaggcaaagtcagcttcctctgggatgttggatctggagttggacgtgtagagtacccagatttgactattgatgactcatattggtaccgtatcgtagcatcaagaactgggagaaatggaactatttctgtgagagccctggatggacccaaagccagcattgtgcccagcacacaccattcgacgtctcctccagggtacacgattctagatgtggatgcaaatgcaatgctgtttgttggtggcctgactgggaaattaaagaaggctgatgctgtacgtgtgattacattcactggctgcatgggagaaacatactttgacaacaaacctataggtttgtggaatttccgagaaaaagaaggtgactgcaaaggatgcactgtcagtcctcaggtggaagatagtgaggggactattcaatttgatggagaaggttatgcattggtcagccgtcccattcgctggtaccccaacatctccactgtcatgttcaagttcagaacattttcttcgagtgctcttctgatgtatcttgccacacgagacctgagagatttcatgagtgtggagctcactgatgggcacataaaagtcagttacgatctgggctcaggaatggcttccgttgtcagcaatcaaaaccataatgatgggaaatggaaatcattcactctgtcaagaattcaaaaacaagccaatatatcaattgtagatatagatactaatcaggaggagaatatagcaacttcgtcttctggaaacaactttggtcttgacttgaaagcagatgacaaaatatattttggtggcctgccaacgctgagaaacttgagtatgaaagcaaggccagaagtaaatctgaagaaatattccggctgcctcaaagatattgaaatttcaagaactccgtacaatatactcagtagtcccgattatgttggtgttaccaaaggatgttccctggagaatgtttacacagttagctttcctaagcctggttttgtggagctctcccctgtgccaattgatgtaggaacagaaatcaacctgtcattcagcaccaagaatgagtccggcatcattcttttgggaagtggagggacaccagcaccacctaggagaaaacgaaggcagactggacaggcctattatgtaatactcctcaacaggggccgtctggaagtgcatctctccacaggggcacgaacaatgaggaaaattgtcatcagaccagagccgaatctgtttcatgatggaagagaacattccgttcatgtagagcgaactagaggcatctttacagttcaagtggatgaaaacagaagatacatgcaaaacctgacagttgaacagcctatcgaagttaaaaagcttttcgttgggggtgctccacctgaatttcaaccttccccactcagaaatattcctccttttgaaggctgcatatggaatcttgttattaactctgtccccatggactttgcaaggcctgtgtccttcaaaaatgctgacattggtcgctgtgcccatcagaaactccgtgaagatgaagatggagcagctccagctgaaatagttatccagcctgagccagttcccaccccagcctttcctacgcccaccccagttctgacacatggtccttgtgctgcagaatcagaaccagctcttttgatagggagcaagcagttcgggctttcaagaaacagtcacattgcaattgcatttgatgacaccaaagttaaaaaccgtctcacaattgagttggaagtaagaaccgaagctgaatccggcttgcttttttacatggctgcgatcaatcatgctgattttgcaacagttcagctgagaaatggattgccctacttcagctatgacttggggagtggggacacccacaccatgatccccaccaaaatcaatgatggccagtggcacaagattaagataatgagaagtaagcaagaaggaattctttatgtagatggggcttccaacagaaccatcagtcccaaaaaagccgacatcctggatgtcgtgggaatgctgtatgttggtgggttacccatcaactacactacccgaagaattggtccagtgacctatagcattgatggctgcgtcaggaatctccacatggcagaggcccctgccgatctggaacaacccacctccagcttccatgttgggacatgttttgcaaatgctcagaggggaacatattttgacggaaccggttttgccaaagcagttggtggattcaaagtgggattggaccttcttgtagaatttgaattcgcgacaactacaacgactggagttcttctggggatcagtagtcaaaaaatggatggaatgggtattgaaatgattgatgaaaagttgatgtttcatgtggacaatggtgcgggcagattcactgctgtctatgatgctggggttccagggcatttgtgtgatggacaatggcataaagtcactgccaacaagatcaaacaccgcattgagctcacagtcgatgggaaccaggtggaagcccaaagcccaaacccagcatctacatcagctgacacaaatgaccctgtgtttgttggaggcttcccagatgacctcaagcagtttggcctaacaaccagtattccgttccgaggttgcatcagatccctgaagctcaccaaaggcacagcaagccactggaggttaattttgccaaggccctggaactgaggggcgttcaacctgtatcatgcccagccaactaataaaaataagtgtaaccccaggaagagtctgtcaaaacaagtatatcaagtaaaacaaacaaatatattttacctatatatgttaattaaactaatttgtgcatgtacatagaattc

SEQ ID NO: 209 - DNA, 444 bp, Homo sapiens
  misc_feature (1)..(444): "n" represents an unknown nucleotide
agaatgaaataatcagtttaatatttatagacttgagaaagaacttgaattaaaattcagtctggagtctgaattagcaccatctgaatacagaaggaattctatgtacatgcacaaattagtttaattaacatatataggtaaaatatatttgtttgttttacttgatatacttgttttgacagactcttcctggggttacacttatttttattagttggctgggcatgatacaggttgaacgcccctcagttccagggccttgnaaaattaacctccagtggcttgctgtgcctttggtgagcttcagggatctgatgcaacctcggaacggaatactggttgttnaggccaaactgcttgaggtcatctgggaagccctccaacaaacacagggtcatttgtgtcagctgatgtagatgctgggtttgggccttgggcttc

SEQ ID NO: 210 - DNA, 415 bp, Homo sapiens
  misc_feature (1)..(415): "n" represents an unknown nucleotide
cggcacgaggctgccgatctggaacaacccacctccagcttccatgttgggacatgttttgcaaatgctcagaggggaacatattttgacggaaccggttttgccaaagcagttggtggattcaaagtgggattggaccttcttgtagaatttgaattccgcacaactacaacgactggagttcttctggggatcagtagtcaaaaaatggatggaatgggtattgaaatgattgatgaaaagttgatgtttcatgtggacaatggtgcgggcagattcactgctgtctatgatgctggggttccagggcatttgtggtgatngacaatggnntaaagtcacttgccaacnatggtnaaacacccgcgatttgngctcacagtngatngggaaccaggttggaaacccnaagccc

SEQ ID NO: 211 - DNA, 291 bp, Homo sapiens
gcatggattagtaataagatgaagaacattcaaaatgtttctcagtatttacaacagttttaccgatcctgtgttgaattaagacccaatgtttccacactcggttttttaaaagttgcaagtgcaaccctgatttttcttttaaaagattacaatgtacattacattttatgaagggaaacaaagagttaattacaagatgcaaaaagataagaaagagacaaactacagcgtgagtattgttcagaggtagtaagtgagcactctaagctacagaacatgttggaattc

SEQ ID NO: 212 - DNA, 250 bp, Homo sapiens
ttttgaatccaaatgatttatttcagttttggctcttaagcacttccattgggaagaagaaactcccaggagtgacctttgagagctgagggttctcggggtggggcagtgtgaggggctgggcaggtgtgaggggcaaagtccaacgggcatcccactcatgcggcctgggctttcccagctgatggggtgggggacaccagtttctttagtcccagcccccagggaacggagcagagggcagagggag

SEQ ID NO: 213 - DNA, 406 bp, Homo sapiens
ttttttttttttttttttcaagctaaattatttctttattaggaaagcaccaacaccacattcttcgaaattactggaattttatttgcctcaggcttatgacttgcaaccaaagacattgtgcaaagaaagcaaagattaagtacactttagggagaaggagacgatacacattggtaacataggagatcagggtgacaaaagaagccatccaatacactatatagattgcaatattcaatagcgctttcaacaaaacttttttttaaatcaagagcaaaaaaattaagcaatgtttacagtagacataaatcttatacaattcaaaaagcttttgttcagatcatagagcataaaatggaaaaatgtatatgcaggtgaaatctaactactgtacatttatcac

SEQ ID NO: 214 - DNA, 445 bp, Homo sapiens
  misc_feature (1)..(445): "n" represents an unknown nucleotide
aagtaaaccaattctaaacttgtcttatcaacaaagaacattaagactcatgatgaaaccacaacttaattcacagaagcaccaacataacacagtttacagtaacctttctcctgtacattgaaacagtataanatataggtaatttcatggtgcattaaaccatggattgtctaactgtgagttcagcaaaaggtgacacaaataggtagcatttgccccaaaacagggtaaatatttttcttatactaatctacaaaaagtggttctatatatatatcttaatgagaaagtgagccacctaaaatggccttatcaaaaaactttacactgcctgaaaaatgtaaaaactattgacagacctctagagacttaaaatcagacagtttttttctcaaactgtttttggaagtagtctggttagaaaccnacattctgtgtccct

SEQ ID NO: 215 - DNA, 206 bp, Homo sapiens
  misc_feature (1)..(206): "n" represents an unknown nucleotide
aaaccttactgatcctaaccccagaggctccctgctctcattttagctttcttaggacatcttcatgcccgttagttcatcgtttgcctagcatgtccctgtggcgtctcaaaaaaaagtttcatcgtcccgtcattgtttctgatgtctttctcgacctcacatcatatttggttctcctactganctttganctagnttgacct

SEQ ID NO: 216 - DNA, 4208 bp, Homo sapiens
tctttaagatttgtagctactaagaaagaaaggagctttttttccttgggccttcaaactgaaagaaccgcatgagcctgacggcgcatggtcttaacatcaggctgtgcaggaagaagctatctgcagatggatgccagcacacacaaggaagcagagctctggcaacattgagtcaaagcaaggacacaacatcagagggacggcagagaatccttgtgtgtagtctttggtggcagtttgaaaattgcaaggagggactttaagactacttctgatttgcaaagatggtctgtgctccgagcaggctaaagtgactggacgagacgcactgttggagaaataaaaatgacttcccattatgtgattgccatctttgccctgatgagcttctgtttagccactgcaggtccagagcctggtgcactgtgtgaactgtcacctgtcagtgcctcccatcctgtccaggccttgatggagagcttcactgttttgtcaggctgtgccagcagaggcacaactgggctgccacaggaggtgcatgtcctgaatctcgcactgcgccaggggcctggccagctacagagagaggtcacacttcacctgaatcccatctcctcagtccacatccaccacaagtctgttgtgttcctgctcaactccccacaccccctggtgtggcatctgaagacagagagacttgccactggggtctccagactgtttttggtgtctgagggttctgtggtccagttttcatcagcaaacttctccttgacagcagaaacagaagaaaggaacttcccccatggaaatgaacatctgttaaattgggcccgaaaagagtatggagcagttacttcattcaccgaactcaagatagcaagaaacatttatattaaagtgggggaagatcaagtgttccctccaaagtgcaacatagggaagaattttctctcactcaattaccttgctgagtaccttcaacccaaagcagcagaagggtgtgtgatgtccagccagccccagaatgaggaagtacacatcatcgagctaatcacccccaactctaacccctacagtgctttccaggtggatataacaattgatataagaccttctcaagaggatcttgaagtggtcaaaaatctcatcctgatcttgaagtgcaaaaagtctgtcaactgggtgatcaaatcttttgatgttaagggaagcctgaaaattattgctcctaacagtattggctttggaaaagagagtgaaagatctatgacaatgaccaaatcaataagagatgacattccttcaacccaagggaatctggtgaagtgggctttggacaatggctatagtccaataacttcatacacaatggctcctgtggcaatagtatttcatcttcggcttgaaaataatgaggagatgggagatgaggaagtccacactattcctcctgagctacggatcctgctggaccctggtgccctgcctgccctgcagaacccgcccatccggggaggggaaggccaaaatggaggccttccgtttcctttcccagatatttccaggagagtctggaatgaagagggagaagatgggctccctcggccaaaggaccctgtcattcccagcatacaactgtttcctggtctcagagagccagaagaggtgcaagggagcgtggatattgccctgtctgtcaaatgtgacaatgagaagatgatcgtggctgtagaaaaagattcttttcaggccagtggctactcggggatggacgtcaccctgttggatcctacctgcaaggccaagatgaatggcacacactttgttttggagtctcctctgaatggctgcggtactcggccccggtggtcagcccttgatggtgtggtctactataactccattgtgatacaggttccagcccttggggacagtagtggttggccagatggttatgaagatctggagtcaggtgataatggatttccgggagatatggatgaaggagatgcttccctgttcacccgacctgaaatcgtggtgtttaattgcagccttcagcaggtgaggaaccccagcagcttccaggaacagccccacggaaacatcaccttcaacatggagctatacaacactgacctctttttggtgccctcccagggcgtcttctctgtgccagagaatggacacgtttatgttgaggtatctgttactaaggctgaacaagaactgggatttgccatccaaacgtgctttatctctccatattcgaaccctgataggatgtctcattacaccattattgagaatatttgtcctaaagatgaatctgtgaaattctacagtcccaagagagtgcacttccctatcccgcaagctgacatggataagaagcgattcagctttgtcttcaagcctgtcttcaacacctcactgctctttctacagtgtgagctgacgctgtgtacgaagatggagaagcacccccagaagttgcctaagtgtgtgcctcctgacgaagcctgcacctcgctggacgcctcgataatctgggccatgatgcagaataagaagacgttcaccaagccccttgctgtgatccaccatgaagcagaatctaaagaaaaaggtccaagcatgaaggaaccaaatccaatttctccaccaattttccatggtctggacaccctaaccgtgatgggcattgcgtttgcagcctttgtgatcggagcactcctgacgggggccttgtggtacatctattctcacacaggggagacagcaggaaggcagcaagtccccacctccccgccagcctcggaaaacagcagtgctgcccacagcatcggcagcacgcagagcacgccttgctccagcagcagcacggcctagcccaacccaggcccaacccggcccaacccagcccagcccagctcagctcagctactccaagggcaggaccaatggctgagcctcgtgtccagactcagagggctggattttggttcccttgtaaagacagagtgaatttcagtataaagatcacccgttgtattcaccccacacccagggctagtataaacatgaccctgggcttctgtaccacactagaattcatgtgagaaagctaaaatggtggtcttctccaccagcccctcacaggcttgggggttttctatgtgaaacacatgccagtttttaaaatgctgctttgtccaggtgagaacatccataatttggggccctgagttttacccagactcaaggagttggtaaagggttaatagccagatagtagaaccagtgaggagatgcggccaaagattctttatatctgaaccaagatgtaaaacaagaaatgctttgaggctttctaagcgatcctcctgtctaatttgcacctttgtctggatgcactcttctgaccttgctgccacaacctgtggggtctgatgtgtcccaagatgggtgctgccctcagggactgcaccctgacaagtgttaaggcaacattccttgcttgtgccctgggccaaaaccaatgctgatgaccttatcagcttcctgtttcttcccatactgcatacaccactgcaaaatgtcttaatgcaaattttgtatttcttacaggcctacagaaattgaaaatgaccaaaatcaggaaccacagatttgtgcccattcctaatattttgttctgcaaattaatgtataatttgaggtgaaattcagttataaagtcaaggacgaatttgcacagtgatatatttctatgtgtatgcaagtacaagtatataatatgtcacctggcacattcattttctcagttgaagaagagaaaatttgaaaatgtccttatgcttttagagttgcaacttaagtatatttggtagggtgagtgtttccactcaaaatatgtcaacttaaaaaaaaataggccctttcataaaaaccaaactgtagcaagatgcaaatgcatggcaaatctgtcggtctccagttggttatctgaatagtgtcaccaattccaccaagacagtgctgagattggaaagggcactcatttggattgccttacttctcttgccttaaatatatcccatatatttaatatgtcaaaaagggcttgaggtgaatttcattaaatggaataatatgatgccactttgcagctaaaataagctcagtgatacctccttgtt

SEQ ID NO: 217 - DNA, 253 bp, Homo sapiens
  misc_feature (1)..(253): "n" represents an unknown nucleotide
gcttattttagctgcaaagtggcatcatattatnccatttaatgaaattcacctcaagccctttttgacatattaaatatatgggatatatttaaggcaagagaagtaaggcaatccaaatgagtgccctttcccaatctcagcactgtcttggtggaattggtgacactattcagataaccaactggagaccgacaggatttgccatgcatttgcatcttgctagagtttggtttttatgaaagggcctatt

SEQ ID NO: 218 - DNA, 352 bp, Homo sapiens
  misc_feature (1)..(352): "n" represents an unknown nucleotide
gcgattcagcttntgtcttcaagcctgtcttcaacacctcactgctctttctacagtgtgagctgacgctgtgtacgaagatggagaagcacccccagaagttgcctaagtgtgtgcctcctgacgaagcctgcacctcgctggacgcctcgataatctgggccatgatgcagaataagaagacgttcaccaagccccttgctgtgatccaccatgaagnagaatctaaagaaaaaggtccaagcatgaaggaaccaaatccaatttctccaccaattttccatggtctggacaccctnaaccgtgatgggcattgcgtttgcagcctttgtgattcggagcactcctgacg

SEQ ID NO: 219 - DNA, 476 bp, Homo sapiens
ttgtgaattatgattctttattcttattggtgcctatgaaatgcaatagggaaacatgtctactaatgagttttgtctttttccacagagaaagcttggactatatttctggaaggcacccactgtggggtgctgcttgttctgtggtgttgctgtgcagcggcaaggaggagcagagggctgcaggagaccctctgagattctgctttgtgcacatgtactgccagcgcatggcattcttgagcccataaagcaagacttctcaggccctgtggttagcatcccccacacccatatcagccactagcattttaaagatggttttaggtgggtacataagggcccagaaaaaaagttttacaattattttaggggcctgaaccctcatgtcatagctaatcagtgaatgaagttaccttttaatccaagagactcatccctgttttcttgggtactaaaactttcagcaatctgaa

SEQ ID NO: 220 - DNA, 423 bp, Homo sapiens
cccaagacaaaactttatttgaagcatcaagcaatatactgaaagaagtgtcatgctcaagtaatgttcttatttccataattgtacatctgatactctctgctctcttaaaaaagactgcatagtgagcaaagatgagtagcacatatgcttttatacataaccctatctatatggtgcttaagaaagtctccttttaatttcattcttccttccttaaaaagcatgttggttttatctgggaaaactaaaacaaactagttcttccacttaggatgcagtttctcccaagttatttatgaaataacacagctgccattttctttaaaggggttcttgtcttctggaattccctttactagaggattctctccagaacgttcttcaagatagttctttatttcttcatgacatttagacact

SEQ ID NO: 221 - DNA, 227 bp, Homo sapiens
  misc_feature (1)..(227): "n" represents an unknown nucleotide
ntttcttaactttttattgacattggcaaattaaaatagantaaattaacaagtattttttcaaaaaaatgttttgtacaaaaatactgtcaaaatttcctaaaaagctttcaacacagtagtatcttttcatgtactgaatataactattagcacagtgtcaaaaatgttgaagacagaaacaaaataaaaatctgtgaaatgtttgccactgacgacattccaca

SEQ ID NO: 222 - DNA, 439 bp, Homo sapiens
ttttttttatagaatctagcaattaccaagacatttattagttgtcaaaaagctttacaatcagtttcatgatcagaaaatagagcaaaatttcaatattgttttctttataaaattgatgaatttctgaaaagataaaggatcatttgatttttaaaaatgtcagcttcatcacatgatgttccagagatctgaccccaaaagcttctcaagttttactatccatagtgtccttatttgtaactgagacccatccgttattttccatctgaagcttcttcagcagtttataacaaagtgaaagaagttggactaagagagccatcatggatcttgtcttcgtaatacacttgtcaacctttagaaatactttattctgcaaagaagtcttagttactgtctggagctggtggcatagaggaattagcttgtttatttc

SEQ ID NO: 223 - DNA, 344 bp, Homo sapiens
tttcaaaactatatatatgagatttatttcacattttctacctactcagtcatgtgagctgttgctacatttgtgaactttctgaaaccaagtgacaaatatccacaaaagatcatttacaatgtagacatcactaaagtctagatttaaaagtccagtgaaaatggcacacagttggcttacagaaataaaaaagtacaatatatttgaaatagtagggtttttgttttccatttatgcctacatcatggtgttacctgtggatatgttatcaacgatattgatatcagatactatgacccatgacatttagtatttttagcaataagaagcacacttaaatc

SEQ ID NO: 224 - DNA, 2639 bp, Homo sapiens
tcgaggcgaccgcgacagtggtgggggacgctgctgagtggaagagagcgcagcccggccaccggacctacttactcgccttgctgattgtctatttttgcgtttacaacttttctaagaacttttgtatacaaaggaactttttaaaaaagacgcttccaagttatatttaatccaaagaagaaggatctcggccaatttggggttttgggttttggcttcgtttcttctcttcgttgactttggggttcaggtgccccagctgcttcgggctgccgaggaccttctgggcccccacattaatgaggcagccacctggcgagtctgacatggctgtcagcgacgcgctgctcccatctttctccacgttcgcgtctggcccggcgggaagggagaagacactgcgtcaagcaggtgccccgaataaccgctggcgggaggagctctcccacatgaagcgacttcccccagtgcttcccggccgcccctatgacctggcggcggcgaccgtggccacagacctggagagcggcggagccggtgcggcttgcggcggtagcaacctggcgcccctacctcggagagagaccgaggagttcaacgatctcctggacctggactttattctctccaattcgctgacccatcctccggagtcagtggccgccaccgtgtcctcgtcagcgtcagcctcctcttcgtcgtcgccgtcgagcagcggccctgccagcgcgccctccacctgcagcttcacctatccgatccgggccgggaacgacccgggcgtggcgccgggcggcacgggcggaggcctcctctatggcagggagtccgctccccctccgacggctcccttcaacctggcggacatcaacgacgtgagcccctcgggcggcttcgtggccgagctcctgcggccagaattggacccggtgtacattccgccgcagcagccgcagccgccaggtggcgggctgatgggcaagttcgtgctgaaggcgtcgctgagcgcccctggcagcgagtacggcagcccgtcggtcatcagcgtcagcaaaggcagccctgacggcagccacccggtggtggtggcgccctacaacggcgggccgccgcgcacgtgccccaagatcaagcaggaggcggtctcttcgtgcacccacttgggcgctggaccccctctcagcaatggccaccggccggctgcacacgacttccccctggggcggcagctccccagcaggactaccccgaccctgggtcttgaggaagtgctgagcagcagggactgtcaccctgccctgccgcttcctcccggcttccatccccacccggggcccaattacccatccttcctgcccgatcagatgcagccgcaagtcccgccgctccattaccaagagctcatgccacccggttcctgcatgccagaggagcccaagccaaagaggggaagacgatcgtggccccggaaaaggaccgccacccacacttgtgattacgcgggctgcggcaaaacctacacaaagagttcccatctcaaggcacacctgcgaacccacacaggtgagaaaccttaccactgtgactgggacggctgtggatggaaattcgcccgctcagatgaactgaccaggcactaccgtaaacacacggggcaccgcccgttccagtgccaaaaatgcgaccgagcattttccaggtcggaccacctcgccttacacatgaagaggcatttttaaatcccagacagtggatatgacccacactgccagaagagaattcagtattttttacttttcacactgtcttcccgatgagggaaggagcccagccagaaagcactacaatcatggtcaagttcccaactgagtcatcttgtgagtggataatcaggaaaaatgaggaatccaaaagacaaaaatcaaagaacagatggggtctgtgactggatcttctatcattccaattctaaatccgacttgaatattcctggacttacaaaatgccaagggggtgactggaagttgtggatatcagggtataaattatatccgtgagttgggggagggaagaccagaattcccttgaattgtgtattgatgcaatataagcataaaagatcaccttgtattctctttaccttctaaaagccattattatgatgttagaagaagaggaagaaattcaggtacagaaaacatgtttaaatagcctaaatgatggtgcttggtgagtcttggttctaaaggtaccaaacaaggaagccaaagttttcaaactgctgcatactttgacaaggaaaatctatatttgtcttccgatcaacatttatgacctaagtcaggtaatatacctggtttacttctttagcatttttatgcagacagtctgttatgcactgtggtttcagatgtgcaataatttgtacaatggtttattcccaagtatgccttaagcagaacaaatgtgtttttctatatagttccttgccttaataaatatgtaatataaatttaagcaaacgtctattttgtatatttgtaaactacaaagtaaaatgaacattttgtggagtttgtattttgcatactcaaggtgagaattaagttttaaataaacctataatattttatctg

SEQ ID NO: 225 - DNA, 400 bp, Homo sapiens
  misc_feature (1)..(400): "n" represents an unknown nucleotide
ttatttaaaacttaattctcaccttgagtatgcaaaatacaaactccacaaaatgttcattttactttgtagtttacaaatatacaaaatagacgtttgcttaaatttatattacatatttattaaggcaaggaactatatagaaaaacacatttgttctgcttaaggcatacttgggaataaaccattgtacaaattattgcacatctgaaaccacagtgcataacagactgtctgcataaaaatgctaaagangtaaaccagggtatattacctgacttagggtcataaatgttgatcggaggacaaatataggattttccttgtcaaagtatgcaggcagtttgaaaactttgggcttccntgtttgggnacctttagganccaaggtctcaccaag

SEQ ID NO: 226 - DNA, 471 bp, Homo sapiens
  misc_feature (1)..(471): "n" represents an unknown nucleotide
ctggacttacaaaatgccaagggggtgactggaagttgtggatatcagggtataaattatatccgtgagttgggggagggaagaccagaattcccttgaattgtgtattgatgcaatataagcataaaagatcaccttgtattctctttaccttctaaaagccattattatgatgttagaagaagaggaagaaattcaggtacagaaaacatgtttaaatagcctaaatgatggtgcttggtgagtcttggttctaaaggtaccaaacaaggaagccaaagttttcaaactgctgcatactttgacaaggaaaatctatatttgtcttccgatccaacatttatgacctaagtcaggtaatataccggggtttanttctttaggcntttttatggcagacagtctgttatggcacgtgggtttcagatgtggcattatttgtacatggggtttnttcccagnatggcctat

SEQ ID NO: 227 - DNA, 396 bp, Homo sapiens
  misc_feature (1)..(396): "n" represents an unknown nucleotide
gtatattctgcatcatttattaaatatttttatatatgcatttacaaactttactcatttcagaactctgctttcaatgcatttttaaactgtttttttttttttttgcagagagattctcttgtaaaatgagatccatgtacaaaactaggcaacagatataaaagtttcctttcatatttttcatccatcaagaaaagaaatcatgtgacaagaaataaaaccaaaatgtggctctttcagaagaataacatgtctgtggtcaactatgacttctaatgagatagttcatatttcanctttatatggatgtatataggttttaataccttcttangctactgtagcatggtttgggttcccgattgaaggaaaaantaaacncccattggtttg

SEQ ID NO: 228 - DNA, 258 bp, Homo sapiens
  misc_feature (1)..(258): "n" represents an unknown nucleotide
aacttcggcacgangcctcgcnntncngngagntcnancagagntntngcacttgaaccagattatngatttaaaagtatatgacatgtattttgtatttaaaactagaatagccagtatttatgttttttataaaactgtgcaatacgaattatgcaatcacaatacatttgtagctcccgagtgtcctaaagggagtgcacttctttgaagctggtgtgttaatactatggtataaaaanggttaactttcaaatg

SEQ ID NO: 229 - DNA, 590 bp, Homo sapiens
  misc_feature (1)..(590): "n" represents an unknown nucleotide
atatgcttgcaggttatatcttagtgcaattcagtcccaaatactttaattttgaaaagaaaaaaaaacatacatttttgaatgtaaaatacccctacagatataaacaggggcgtttcccctcttaatactttggttttcaatacagtcagtggtatagcaaagactacacatacccaacttatatttaagttgcaagcacatgctgtataagctactttttttaaacagtccccttgcaaactctaccccccttaacatcacaatagtaaacaatttagtgcatcaatcgtttaaaaaatctacagctaaacagacctaactctttcaaatttatctataacattcctttatctgtagcatacattttaactgggctaacagattataaaaactagaattaaattatatactagaaacccagagcattccacatttgacaatgaccaaaagccaaaaaatataaaataaaaataaaacaaaccaaaaataatggggcgtttcccttttaaaaaataaattttagctgcntctcggnaatanccaatttaggncccaagtggggcgccatctattaaaggnacattagg

SEQ ID NO: 230 - DNA, 416 bp, Homo sapiens
  misc_feature (1)..(416): "n" represents an unknown nucleotide
ctcagaacttcaacctcccaatgcactgaaggcattccttgtcaaagataccagaatgggttacacatttaacctggcaaacattgaagaactcttaatgttttctttttaataagaatgacgccccactttggggactaaaattgtgctattgccgagaagcagtctaaaatttattttttaaaaagagaaactgccccattatttttggtttgttttatttttattttatattttttggcttttggtcattgtcaaatgtggaatgctctgggtttctagtatataatttaatnctagtttttataatctgttagcccagttaaaatgtatgctacagataaaggaatgtnatagataaatttgaaagagttanggtctgtctagctgtagatttttttaaacgattgatgcac

SEQ ID NO: 231 - DNA, 485 bp, Homo sapiens
tttaaatgtcatcatcatagtcttttaatattttacataaaaaactgtatacacagcttatagaacttttatgtaaacatcataagctcaccattttgtcatttgtcagtttatttaaaaaataaaaaacaagacaacaatttagtagaagtaccactgggagggtggggaggggaaaaaaggatatacaggggcaggtgtattctctgtacagaggtgcagagaaaatttcacatagctttagagaatgccttgtggaaaaaaaaaaaaataggccccaatacttgttactgccctttatcaaaactgtgtgcatgacctgcacaaataaaatcacaaaacagtgttgccacattcttcaaggaaacaaagcaaaatttagtgggtttcttttccctctccttgttaaaagtcattttttaaaaacatcagaagtagatgaggttacagcgtacaagtgtggtcagaatgctactgtcgtatgc

SEQ ID NO: 232 - DNA, 348 bp, Homo sapiens
tgaacatattcattgtttgtttattaataaattaccattcagtttgaatgagacctatatgtctggatactttaatagagctttaattattacgaaaaaagatttcagagataaaacactagaagttacctattctccacctaaatctctgaaaaatggagaaaccctctgactagtccatgtcaaattttactaaaagtctttttgtttagatttattttcctgcagcatcttctgcaaaatgtactatatagtcagcttgctttgaggctagtaaaaagatatttttctaaacagattggagttggcatataaacaaatacgttttctcactaatgacagtccatg

SEQ ID NO: 233 - DNA, 265 bp, Homo sapiens
gcaatataaataaagatttattttcaaaagtagcaaatacttgtttgaaaaaaatatatatctttaagtgtattactttataaatgtgactgtcaaagtcagctatcctatgatctacattttacaacatattgtacaaaagatacattgataggctcttatctatttatatatttataattacatattgcacttggtccagcaaggcttgcagagtcatttcacggtagaagttaataaagttaaatagatgggaatctttgta

SEQ ID NO: 234 - DNA, 1260 bp, Homo sapiens
atgaagtttccagggcctttggaaaaccagagattgtctttcctgttggaaaaggcaatcactagggaagcacagatgtggaaagtgaatgtgcggaaaatgccttcaaatcagaatgtttctccatcccagagagatgaagtaattcaatggctggccaaactcaagtaccaattcaacctttacccagaaacatttgctctggctagcagtcttttggataggtttttagctaccgtaaaggctcatccaaaatacttgagttgtattgcaatcagctgttttttcctagctgccaagactgttgaggaagatgagagaattccagtactaaaggtattggcaagagacagtttctgtggatgttcctcatctgaaattttgagaatggagagaattattctggataagttgaattgggatcttcacacagccacaccattggattttcttcatattttccatgccattgcagtgtcaactaggcctcagttacttttcagtttgcccaaattgagcccatctcaacatttggcagtccttaccaagcaactacttcactgtatggcctgcaaccaacttctgcaattcagaggatccatgcttgctctggccatggttagtctggaaatggagaaactcattcctgattggctttctcttacaattgaactgcttcagaaagcacagatggatagctcccagttgatccattgtcgggagcttgtggcacatcacctttctactctgcagtcttccctgcctctgaattccgtttatgtctaccgtcccctcaagcacaccctggtgacctgtgacaaaggagtgttcagattacatccctcctctgtcccaggcccagacttctccaaggacaacagcaagccagaagtgccagtcagaggtacagcagccttttaccatcatctcccagctgccagtgggtgcaagcagacctctactaaacgcaaagtagaggaaatggaagtggatgacttctatgatggaatcaaacggctctataatgaagataatgtctcagaaaatgtgggttctgtgtgtggcactgatttatcaagacaagagggacatgcttccccttgtccacctttgcagcctgtttctgtcatgtagtttcaacaagtgctacctttgagtgtaaactaaggtagactactttgggaatgagaacatccaaaatcaggaaaggctgtagaaggaaatataccttaacaggctgatttggagtgacccagaaaa

SEQ ID NO: 235 - DNA, 597 bp, Homo sapiens
  misc_feature (1)..(597): "n" represents an unknown nucleotide
ttggtctttatgtgcttaaataacgctgaattataattagccacacaaataatgagagttttattttttttttctggctcactccaaatcagcctgttaaggtatatttccttctacagcctttcctgattttgcatgttctcattcccaaagtagtctaccttagtttacactcaaaggtagcacttgttgaaactacatgacagaaacaggctgcaaaggtggacaaggggaagcatgtccctcttgtcttgataaatcagtgccacacacagaacccacattttctgagacattatcttcattatagagccgtttgattccatcatagaagtcatccacttccattttcctctactttgcgtttagtagaggtctgcttgcacccactgggnagctggggagatggatgggtaaaaagggctggctggtanctctgactgggnacttctgggcttgccggttggtccctggagaagtccggggccgggacagaaggaaggatgtaaatctgaacactcctttggtcaaaggtcaccaagggtgtggctgaggggacggtagacatagacgganttccgaggcanggaagactgc

SEQ ID NO: 236 - DNA, 389 bp, Homo sapiens
  misc_feature (1)..(389): "n" represents an unknown nucleotide
ctctgcagtcttccctgcctcncgaattccgtttatgtctaccgtcccctcaagcacaccctggtgacctgtgacaaaggagtgttcagattacatccctcctctgtcccaggcccagacttctccaaggacaacagcaagccagaantgtnngnttcagaggtacagcagccttttaccatcatctcccagctgccagtgggtgcaagcagacctctactaaacgcaaaagtcgtngaaatggaagtggatgacttctatgatggaatcaaacggctctataatgaagataatgtctcagaaaatgtggggtctgtgtgtggnactgatttatccaagacaaganggacattgtttcccttgtccaactttggaagnctgttttctcg

SEQ ID NO: 237 - DNA, 217 bp, Homo sapiens
  misc_feature (1)..(217): "n" represents an unknown nucleotide
agcagaggggtaaattgaaacatcagtnctctagaccagtcaggaaatgtatgctttgtgctttataagcttacattcaacatagatgacagaagttaccatactcaaatgtaagatagggagaggnagaagaaatagctgagaccttgaaaagatgtactgttattgtcaacaaaccaatgtcttctcccttcataaanttgtgtttaggggattt

SEQ ID NO: 238 - DNA, 508 bp, Homo sapiens
  misc_feature (1)..(508): "n" represents an unknown nucleotide
ttctgggataggcccagaagttcctgatgaccgcgacttcgagccctccctaggcccagtgtgccccttccgctgtcaatgccatcttcgagtggtccagtgttctgatttgggtctggacaaagtgccaaaggatcttccccctgacacaactctgctagacctgcaaaacaacaaaataaccgaaatcaaagatggagactttaagaacctgaagaaccttcacgcattgattcttgtcaacaataaaattagcaaagttagtcctgggagcatttacacctttggtgaaagttggaacgactttatctgtccaagaattcagctggaaggaattngccagaaaaantgcccaaaantcttcagggagctncgtgcccntgaggatgaggttcaccaaagttgcggaaaagtttacttttcatgggattgaancagatggttgttcttaggattggggancattccgttgaaggagttcgggatttgnaaatgggggttttcgggg

SEQ ID NO: 239 - DNA, 269 bp, Homo sapiens
tttttgctaaattcttttatttttgtttaaattttcacttcaattttaattcttgaagaacagcctcgacaacatatatcgcactcattataagaagcaaagggttatatcaaaaattattagtatagaatcacaggaaatctggtttggaaccagaaaaaaatacaaaacagatatagatacatagacacaggacaattttttataattatttggaaaatgttattttcccctaattcttgtttcctttgtctttatgcgcatacgat

SEQ ID NO: 240 - DNA, 427 bp, Homo sapiens
gcaggattcactctaatgagatttttggatcgatttgtataccgaaatccaaagccccataaaggcaaagaaaacacagatagtgttgtgatgcagccgaaaagaaaacattttattaaggatattcgtcatcttcctgtgaacagtaaggagttccttgcaaaagaagaaagccaaataccagtggatgaagtgtttttccacaggtattataaaaaagttgctgttaaagagaaacaaaaacgggatgcagatgaagaaagtatagaagacgtggatgatgaagaatttgaagagctgattgacacatttgaagatgataactgtttcagctctggaaaggatgatatggaccttccaggatttattgtggacggatgtggatatattctgtacaggaacaacacatatggaagtggactgaagc

SEQ ID NO: 241 - DNA, 347 bp, Homo sapiens
  misc_feature (1)..(347): "n" represents an unknown nucleotide
ttttagnttttttangccnatatatgactatanggagtccngtagataaatacgagcccacttttttttttcagcctancctcccccacagaggctgctgcgctacttacaaattgaattaaatgagggctgaaacggcacgcttcagcatgtactgtagtcaccgtggaagaacaagtctttccaatattggggcatgtattgatttctaaaaaatgtctgcctggggaatgaaatatgcacatgtatttcatattcacagatctgcttccgaaaacctctctatttaatatcactcaattatgaaatttggttttgctttcagagggaanggaatngcattncag

SEQ ID NO: 242 - DNA, 376 bp, Homo sapiens
  misc_feature (1)..(376): "n" represents an unknown nucleotide
tcctcnttacctgggcagagtgttgtctctccccaaatttataaaaactaaaatgcattccattcctctgaaagcaaaacaaattcataattgagtgatattaaatagagaggttttcggaagcagatctgtgaatatgaaatacatgtgcatatttcattccccaggcagacattttttagaaatcaatacatgccccaatattggaaagacttgttcttccacggtgactacagtacatgctgaagcgtgccgtttcagccctcatttaattcaatttgtaagtagcgccnggcctctgtngggggnagggataggctggaaaaaaaaaagtggggctccgtnttttntcctacagggacttccatatagtccn

SEQ ID NO: 243 - DNA, 489 bp, Homo sapiens
cctcttcctcctcctcttctacttcaggctcatctttcattctcattagagttggagggagttctggacgcttggggggtaacttccctactgttccagtttttaatttgaatttgcttcctcctttcatggcaccaaatagaggcaatgtaagctttttagctttgttttctgcacctgtagtctgagtttcagtcttttttagttctggaatctctgctggctttacaatttttattaaccctttaagtctctgttgttctttcctcagttcaaaagttctcaggtgaagtttcttccgggacacaccatctaatgtactgcctgatttcatttctgacatgaacgcatctaaagaatcctgagatggagactctgatagaacttggcttgaggctttcaatctctcagaaatttcagaaagttccctctcagcatcatttaattttgcaaccaatgattcaaaggtctctggcttctcatcaatct

SEQ ID NO: 244 - DNA, 455 bp, Homo sapiens
  misc_feature (1)..(455): "n" represents an unknown nucleotide
gcaggcatggttcaggctttactgggcatcacacggagctggggtagggacccagcaaagggagcagggcatacagatggtctttgaggacagtgctagggagctcagagatcagtctggcttctcaaagaagagaaaagcactgacaggaaaagcagtcaggttnggcgttagtgcagggaaaggaagacgttaggagggggactttgatggaggacagtggggagctgaagctttaaaagagcctcgatgcggggagggatgatgttagaagaaaggaagccaatgaggccttggggaagagaagagagtagaaagaaggaaaaaggaagaaggcaggtccagggagtcangctgtcctcccagggtccgcaggcagcaaggttggctcctccctccccatcttntcggnattcactgggccccntatttgctgtttccatggtagctgactt

SEQ ID NO: 245 - DNA, 214 bp, Homo sapiens
agctggtcagactgtgctatgacccagattttgagaaactgaagccaaaatacttggaggaactccctgaaaagctaaagctctactcagagtttctggggaagcggccatggtttgcaggagacaagatcacctttgtggatttccttgcctatgatgtccttgacatgaagcgtatatttgagcccaagtgcttggacgccttccttaaaac

SEQ ID NO: 246 - DNA, 746 bp, Homo sapiens
  misc_feature (1)..(746): "n" represents an unknown nucleotide
tcagaaccaagaagaaaatttattcataggtttatttctattacatctgctcagctgtagtgttacaacaattttgccttcaactcagctttcttcagctccagagaatattttagctcctccattgtcatgccactttcctttaattgttgcataaagttctccatggcttcgcagaggttcttactctcctgaaaggcaagaagtgccttctcacactctggtttggaagcttcctggatcaacttgcagactggaagtgcactgctccactccccatcaacgcattgctgctcctgcacgcccactaagtagtacctgtcttcacagtaataactaatggtggatcctaaggtgaaattatttccttcaaaatagccatgaactggattcccaggagggtcacagtccctacttttgcagatgggaaagggaggtgcccaggtgtggtcctctagacactggctccgattgctgcccttgaggatgtagtggtcattgcacataaacgtgattttgtcacttacattcacaggccctgaagaactgaactctccattcaccagcacaggatcaggacagtgngccaagcggcactcagtagtggtgttatcccattcctagaggcattgcaaaaaagggtcttccttcctacaggtggtagcccttgatacaaacgtaatccccagaatcggtctttcaactccttggcgacaatatgccatgtccctcgaggaagccctgga

SEQ ID NO: 247 - DNA, 514 bp, Homo sapiens
  misc_feature (1)..(514): "n" represents an unknown nucleotide
tgaaggccaagggtttaatcctctttattataactgctgagatcagaagcatgtgcaaatattctttgaggtcaagatggatcccaagagacctctagccagtcactaactgcttctccatcctgaatattgctttgtttacttgaagtttacacatgggaatgagtaaaactgtgacctccaaaaatgacaaggaatcgccgaggagataaatcttacaatccaagtaaaaataaatctgatgatcacaatgagacattaaaaattaaaaagagcaatgcaggaaggagagggggagagagagggttgtaatagccctggaaaaccatgttttttttaggtaccaaagggatttaggttttgccattggnttgccaccacaggcagctnttttgagttgggggggccagtttattttttttcccaaaacctngcgtctccccgggnaaatcttttttttttttttcccggnggattggtttnggtccccncctttnggggcctttttcccctt

SEQ ID NO: 248 - DNA, 375 bp, Homo sapiens
  misc_feature (1)..(375): "n" represents an unknown nucleotide
tcgccgcagatcaatgcttcgaacttctactttaacaaaaccaagggcttttactgcctgcgggacagcggccgggaccntgcnttacatgagtccaaaggccgggcgcacccccaagtcgatcccaaactactcaataaactgcacgaatattttcatgagccaaataagaagttcttcgagcttgttggcagaacatttgactggcacttgatttgcaataagctaagctcaggaaactttcctacttgtaagttctgggtgttacatcttgaggggggaaaaagatttttaaaaaaagccttttaggtattaatttattttgttaaaatnccataaagtacttcttgtaccagtattagggtttcaccattg

SEQ ID NO: 249 - DNA, 331 bp, Homo sapiens
catgtatatttgtacaaaaagtttttaaagttatactaacttatattttctatttatgtccaggcgtggaccgctctgccacgcactagctcggttattggttatgccaaaggcactctccatctcccacatctggttattgacaagtgtaactttattttcatcgcggactctggggaagggggtcactcacaagctgtagctgccatacatgcccatctagcttgcagtctcttcgcgctttcgctgtctctcttattatgactgtgtttatctgaaacttgaagacaagtctgttaaaatggttcctgagccgtctgtaccactgccc

SEQ ID NO: 250 - DNA, 325 bp, Homo sapiens
aaaaaggctttattcattttttgatcagggaaaaggacaatctcaatgtcaactcgtcacctaatcataaatttgaacttacaggattcactaccctagacaccgcacctactgacaacacaacttaaaaatgaacttacttccattccctaaagttgcatgttgaatgaacagaatcccttctaacagccaacattggtacttggcctaagtttaagaatagcaaaacagcagcaaaaaagaggccaagagcattataatgtgatagcccaggaagtagaatcattgttaagaaagttgcaggcaccaaattaaaaaaaaaaaa

SEQ ID NO: 251 - DNA, 359 bp, Homo sapiens
caaaacattttgaaaagcatttacttttttgaccacgagccatgagttttcaaaaaaatcgggggttgtgtgggtttttggtttttgttttagtttttggttgcgttacctttttttttttagtggggttggccccatgaagtgggtgccccactcacttctctgagatcgaacggactgtgaatccgctctttgtcggaagctgagcaagctgtggcttttttccaactccgtgtgacgtttctgagtgtagtgtggtaggaccccggcgggtgtggcagcaactgccctggagccccagcccctgcgtccatctgtgctgtgcgccccacagtagacgtgcagacgtccctgagagg

SEQ ID NO: 252 - DNA, 426 bp, Homo sapiens
ttttcaatattatttatcaaaataaatttattaaaagtattcaaagaccacttcaaagtgtagctgccttcaagacagatttttggcactcataacggacactgcagttttcaacaccatagcactcattctatttcacacatcatttttaacaatgcaaacacggaccatttcagttttagcattacatgagacaacagtactgatgatctgtggtcataagaacttcaataccgttgcacatagtaaacacttcactgttactgaatcctaaactaaaactactatgtggtaacatggatcgatttagggaaagatgtacaaccagctacctaaggccacataatcccagatctattgattttaaatgcttttggaccaacagtattacattgtctctttcatcatcttacattcctgcttttc

SEQ ID NO: 253 - DNA, 379 bp, Homo sapiens
aaagttctgacaagtatttattaagtgccacattgtcgttataagctgattgacagttttcttcaaaattgtgtgattttttcattatatatttttgcaacacaagtaaaacgtttgtcctgaaaaaatgagaaattcagataaaacaaaaatttaaaaaatcacctattatcttaccacacaaccactgttatgcctttgaagtctatacttttagctttttctttgcatattaatatataaatatacattttttttacaaaaatgggatacaatatataccatttgaaaattgcttttttcgtttcacaatatataatgtacatctgtcatgcaaatgtgtagggctcatgactgaaagagggaaacttgtagattt

SEQ ID NO: 254 - DNA, 469 bp, Homo sapiens
  misc_feature (1)..(469): "n" represents an unknown nucleotide
tttggtcgagagggaaagcagaagaagtctgctggtcacagcggggcacctcgaggagaggacgactaggagcacacggcccggaaaggtccagaataactgtgcttgaagaagaaaattcccaacatggacaaaccacgcaaagaaaatgaagaagagccgcagagcgcgcccaagaccgatgaggagaggcctccggtggagcactctcccgaaaagcagtcccccgaggagcagtcttcggaggagcagtcctcggaggaggagttctttcctgaggagctcttgcctgagctcctgcctgagatgctcctctcggaggagcgccctccgcagaggtncgtttccaggaaggacctgtttgaggggcgccctcccatggagcagcctccttgtggagtaggaaaacataagcttgaagaaggaagctttaaagaaaggttggctcgttctcgcccgcaatttagag

SEQ ID NO: 255 - DNA, 257 bp, Homo sapiens
  misc_feature (1)..(257): "n" represents an unknown nucleotide
cctcctcagttcttcatatttctctcaaattacctttcaacaatatgttcatatctcagccaataaagcgatggttgatccacatgcaaataaaaaggtaaggaaaaaaatttaaatgggttttaaaaattcagactgccaaaaatagatgaaatagctcagaagagacataatacttatgaaaactgagaaagtgatctttttattttcaaccaagataattcaattcataaattgttgcnggattatgnaaccng

SEQ ID NO: 256 - DNA, 420 bp, Homo sapiens
  misc_feature (1)..(420): "n" represents an unknown nucleotide
ggcaaatacgtagactcggagggacatctctacaccgttcccatccgggaacannggcaacatctacaagcccaacaacaaggccatggcagacgagctgagcgagaagcaagtgtacgacgcgcacaccaaggagatcgacctggtcaaccgcgaccctaaacacctcaacgatgacgtggtcaagattgactttgaagatgtgattgcagaaccagaagggacacacagttttgacggcatttggaaggccagcttcaccaccttcactgtgacgaaatactggttttaccgcttgctgtctgccctctttggcatcccgatggcactcatctggggcatttacttcgccattctctctttcctgcacatctgggcagttgtaccatgcattaagagcttcctgattgagattcagtg

SEQ ID NO: 257 - DNA, 575 bp, Homo sapiens
gctgtggaaacacagtggttgtcaaaccagcagagcaaactcctctcactgctctccacgtggcatctttaataaaagaggcagggtttcctcctggagtagtgaatattgttcctggttatgggcctacagcaggggcagccatttcttctcacatggatatagacaaagtagccttcacaggatcaacagaggttggcaagttgatcaaagaagctgccgggaaaagcaatctgaagagggtgaccctggagcttggaggaaagagcccttgcattgtgttagctgatgccgacttggacaatgctgttgaatttgcacaccatggggtattctaccaccagggccagtgttgtatagccgcatccaggatttttgtggaagaatcaatttatgatgagtttgttcgaggagtgttgagcgggctaagaagtatatccttggaaatccctctgacccaggagtcactcagggcctcagattgacaaggaacatatgataaaatacttgactcattgagagtgggaagaaagaaggggccaactgggatgtggagaagcccgtggggaataaag

SEQ ID NO: 258 - DNA, 450 bp, Homo sapiens
  misc_feature (1)..(450): "n" represents an unknown nucleotide
gctctgattaaaatttttattgaaatctctcaaaggtcgtcaagaaatagtttttgtgaaaggggggaaaatagctaacaaacaaattcaacatgggagctccctctgctggtctgcagtaggttggtatgttacaaacacattcccagagacaaatctaatttgctggagaagtggacaaaagacaggtgtgttgggctttgctcaggagagaaacactgggcatgcagtgaagcgggataggtgaaagcaggaggaggtagagcaggcgctaactccgctgggtacagagggtacggggcccacacttcagggctactggggtaaagtgcaggcactgtgaagctcatatgggctctctgggcaatgaactngaggtnacagtgtttgggcagaggagtactggggtttggagtccctacgagtttgttcttggccatcttcgtgttt

SEQ ID NO: 259 - DNA, 204 bp, Homo sapiens
cagtcgctcagaagcagaggctgcaaagaatgctttgaatggcatccgcttcgatcctgaaattccgcaaacactacgactagagtttgctaaggcaaacaccgaagatggccaagaacaaactcgtagggactccaaaccccagtactcctctgcccaacactgtacctcagttcattgccagagagccatatgagctcacag

SEQ ID NO: 260 - DNA, 182 bp, Homo sapiens
agcttttaccagcatctaatgcttcactgctttttttccattgtagactttaatgcacttgaataaatacatggagttgttttttctcaaaatgaattcacaaataaagactgagatggtccaaaaaaggaaagaggaagccatttgcgttatttcacgttgctgagcctttctctcatgtt

SEQ ID NO: 261 - DNA, 176 bp, Homo sapiens
attaaaacttcagattgttcaacatgagagaaaggctcagcaacgtgaaataacgcaaatggcttcctctttccttttttggaccatctcagtctttatttgtgtaattcattttgaggaaaaaacaactccatgtatttattcaagtgcattaaagtctacaatggaaaaaaagc

SEQ ID NO: 262 - DNA, 495 bp, Homo sapiens
  misc_feature (1)..(495): "n" represents an unknown nucleotide
ttttttttttaagagtcattcaccagatatatttgaagtctaagctctttgagctatacacgtgcacaaatgattcagttggtggaaatcttccccttccccttcattgttaaagttttcaaacttaaaatagtgctaaagagatttgcataatgtgcgtcatggaaatgctgaggcgattctgactttcacagtgctaggaggttcccttggcaacacttcaaggagtctttccatttcttatcgttctcctagggaaaagcccctcttttcccccctccccaaacccaacctaggtgaaaggaattacttggatctgaggacagggttaacattggacacagaggcaataagntttactaaggnctaactccagaggggccatacactttcattgtggtttcnttttatgggcntacacaggatgggggcattttcaacttttactagggtggttaaaaaagtcaggngggggnttttttaaaaaacntttta

SEQ ID NO: 263 - DNA, 476 bp, Homo sapiens
  misc_feature (1)..(476): "n" represents an unknown nucleotide
ctatcaagaccacttgtttttaaataaagatgcaagtgtcagttgtagattattgggatgaagctaaatccccagaatgcagcagcagctgagcatgttaaaatggggaaggatgatagctacatgtatgccggtcctactcacgcgacacccgtgtgctcaaaaaagttatttgtttttgttacgtgtgatttttctatttctctagcccaaagtgcattacagaagatacacctatagaaccattaccttctgctatgtgtgccagggcctcatctactcctgtacattaatgaattactttagatgcaaacgcaggattacaatgggagtggggggaagtactttcattacccaagcctcaggaaaaacacacaaggaacaataacacaggcaaacaggtttgagggggnttttgtggggtttttgactaagggtgttntgtttaggttttccntccgggaactttaaaacct

SEQ ID NO: 264 - DNA, 513 bp, Homo sapiens
  misc_feature (1)..(513): "n" represents an unknown nucleotide
aagagagagaaagaggattgtttttgcattgcgtttgtcacacagcagcacaaagacaatatatgtaagcgttgtncgaccagatttgacacaagagatagcgaacaccacaaagattaggacagaccgcgtatagtaagctctgaggaactccaagaatctagagggggctgtgggaacgctgcttagatctcctcgtcgccggcctccttgctgaaggtggtcatgtcgatcttctcggggaagatgatgttgacggccaggtcctccccgctgttgtactgaagcagcaggttcttcttcttccgcagcatgtggttgtagcgcaggttggacacccaggtctcgcacttgttgaggaagacgatacccacagtgcccagcaccaccaggctggtgagcacgcccaggatggtgaagcagatggcctggcctcggtgaggagaggggttttcttgttgagctctttcatggacaccttcaggatgcggtgctccggctgctgcaccggca

SEQ ID NO: 265 - DNA, 331 bp, Homo sapiens
ttttttttctagcgaagttgataaacaacttcaatatttgcctttttgtgagaaaaggtatttcacagtatttaccactttgatgtcctcgcagttttattaaatgtatcctctctgtaaaactttgcctgttttaaatgagcctttccttgatttaaaaaaatacctgtttacacatcttctagattcttgagaacgccagacacagttcttaaggccaaatttgtatcgttattgttaagaatcgtcatcaaaagtgtctttggaaccatacaaatctgctagtttcttaaaacgaggtccccagttctgtagataatcatagtccaag

SEQ ID NO: 266 - DNA, 351 bp, Homo sapiens
tgagctccctagagtcggccaccacagattcagacttggactatgattatctacagaactggggacctcgttttaagaaactagcagatttgtatggttccaaagacacttttgatgacgattcttaacaataacgatacaaatttggccttaagaactgtgtctggcgttctcaagaatctagaagatgtgtaaacaggtatttttttaaatcaaggaaaggctcatttaaaacaggcaaagttttacagagaggatacatttaataaaactgcgaggacatcaaagtggtaaatactgtgaaataccttttctcacaaaaaggcaaatattgaagttgtttatcaactt

SEQ ID NO: 267 - DNA, 5718 bp, Homo sapiens; identical to SEQ ID NO: 176

SEQ ID NO: 268 - DNA, 496 bp, Homo sapiens
aaattaagaactgatttaatactaaagttctgaataaaggtgtgcattttatgattgattctatctttttgcacaagttggatactccagtttcccatcccaacatgttgtacgcaatgtgtgagaacgtgatgaaagacgatatccacgtttacacacaaattcagctgattcacctgttctcaaataaagcttctgtttggctgtccaccttaatgctatgttataattttccataatttctcgggatattacacacggatgtaagcattttggtggttctgaccattgtccatttctacatgttattcgcttgttaccctcaagttgatacaagttctggcattggtactcaactgatgaagctggagcatatactgacaacgggaatgaagtaatgtccccattgtcaataggtggagggggccacattttccgtagaatcttgcattgaggtggttcgtcccagttcatttaacacatacttcttcatccc

SEQ ID NO: 269 - DNA, 420 bp, Homo sapiens
  misc_feature (1)..(420): "n" represents an unknown nucleotide
tttttttttttttttttttctccaacaatctggaattttattccatccatatacatgcatagtaacaacatttnttgagaaattatttctatcagaagtagaacattatctttgtgatcaccaggngcagtattgctactcttatatttaaatagatcttatatatgaattaaattcatacttgcagcattgagtttagggtttcgatttagactgtgcctttcaaaagataaaactgattaatactacctcattacttacaatactgcttccagtaattttgttcattctttataaagtattgcatttaacagcaaaggtttaaaanttgagancagagctgcatcagcgaanggaaantacaagtactatacaagggnaaaatttgccatcttcctttaacntacaggttcngggtta

SEQ ID NO: 270 - DNA, 456 bp, Homo sapiens
  misc_feature (1)..(456): "n" represents an unknown nucleotide
tcaccaggaattccctcagcagaggaacagttgtctagtatagcaaaaggtgtgaatggttccagccaggctccaaccagtgggaaatattgccggctatgtgatatccagttcaacaacctttcaaactttataactcacaagaagttttattgctcatcacatgcagcagaacatgtcaaatgaactaactaaacatcagtcacctttggtatcagtgtttagtatgttgttctaaccagtccagaaaaaaaaataagctgtttgaattacatctggggcaatcaggaggataatttcattatgggctgagttgaaggactttaagggtgtaatttccatttacagtccctttggttaaagtgtattattgggtgcccttttttcaaaaaatttaatttntttttacccggcagtatttcnaggcngtggggtangttattttttattttaaaa

SEQ ID NO: 271 - DNA, 544 bp, Homo sapiens
tttttttttttctgaagaatagcatctttaatgagtgttctaatccttgtcatctgaagttttgaaatatatttaccagggtcagaacaatacagagatagtatttgtataatatagcttattttaaatttcatttaagccctctcatttctcctcccacagctgctgttttgttttgatgaaagagaaataaggaataaataaaaggtcaatgcttcaaactaatctacctgtgtactccctgaaaactctgggactgtatccacagaatagggaaaactattctcaaatgcacagtcactcatgcctcaggcatgaactgatgttctttcaaaagaaaaaagaacaggggcaaacttccagtcctatgtttgacacatactaaaaccccaaagagaagactgaattgtatttgttcccagacaagacacccctgtgaccacagcataatgaattcggctcaacattttagggggtcaattcccgacaagggaaggattccagccaaggctgggggtcaagtctggaattccccccttttggg

SEQ ID NO: 272 - DNA, 588 bp, Homo sapiens
  misc_feature (1)..(588): "n" represents an unknown nucleotide
ttttcattaataatatttattttaaagatcaacttttattgtaacaaatataaagtcatcaatgttttacaaattgtcaaaaatgctttaagtacaaaaaaatacattagtaaaatgaaagttatgttgtattatttggtatacacttaatactgccaacatgcataacatatgccagaaaagctcatgcattattggaagagaaaagaaatgtgatgtaactgctatattgtctgattataaattcattgcttcagtcagttttctttcttcagggataccatttacctgtagtctgctgttggggaatctgagtctgatgtggcaagttctgctgcgtttgcatcaatggcatgtttgtgctatcatagttgtctgtgtgtaaaggaggtatgatttccccagtcacagggtggaacacaggaagcgttgacaggggccatgctatctctctattcttggacatgtctcgaagctccttggtagatttctgaatagcactgtgatggaccagttggatgtctggtgtttgcatngttctcttttccacgcctcccgtcggcagcacatgatataagcagtaattag

SEQ ID NO: 273 - DNA, 453 bp, Homo sapiens
gtgtccacctatcaggaagtgattcgtggagaggggattttacctgatggtggagaatacaaacccccttctgattctttgaaaagcagagactattacacggatttcctaattacactggctgtgcctcggcagtggcactggtcctttttctaatacttgcttatatcatgtgctgccgacgggaaggcgtggaaaagagaaacatgcaaacaccagacatccaactggtccatcacagtgctattcagaaatctaccaaggagcttcgagacatgtccaagaatagagagatagcatggcccctgtcaacgcttcctgtgttccaccctgtgactggggaaatcatacctcctttacacacagacaactatgatagcacaaacatgccattgatgcaaacgcagcagaacttgccacatcagactcagattccccaacagcagactacag

SEQ ID NO: 274 - DNA, 342 bp, Homo sapiens
ggcgttgaaggaatttattcatgagaagactgagggtccatcagggagactgtccaatggtgacaagctccagaagcccgcgtcgcaacagccaggagggccaggccaccccaggcaggaggcagtgggctggcagccaccctgggcacagaagagcagacgcagacagtgctgggcaacgaggggctttcttcatgggcccgcctgccctgtccctccccccaggtccccaccttctagggttaaagtgcagctgggagggaggaggcaggcagaattggggagctagagagagcccaagtgaaccctgactgtccacgcaagtcccatgtcctcctcgtc

SEQ ID NO: 275 - DNA, 446 bp, Homo sapiens
  misc_feature (1)..(446): "n" represents an unknown nucleotide
gcaatgaaatnttatgtttttaattaggcagaatccagatgctcaaggcccttnataatancccccagtttagtagttggacttagggaacaaaggaaccttnaatagaaattggacagcaagaaagcgagcttagtgatacttntgggccagggcattagccacaccagccaccactttctganaggcagcctgcactggtggggtgaattctttgccaaagtgatgggccagcacacagnccagcacgttgcccaggagcctgaagttctcaggntccacgtgcagcttntcacagtgcagctcactcagtntgggcaaaggtgcccttaaggttttccagggtnagccaggccatcactaaaggcaccgagcactttnttgccatgagccttnaccttagggttgccctnaaaagnttcaggattagacagtttccccaaagg

SEQ ID NO: 276 - DNA, 107 bp, Homo sapiens
  misc_feature (1)..(107): "n" represents an unknown nucleotide
caacctnaaacagacaccatngtgcaccttactcctnaggagaagtctgccgttactgccctntgggaaagggtgaacgttgatgaagttngttgtgaggccctggg

SEQ ID NO: 277 - DNA, 1901 bp, Homo sapiens
aaaaaacagcagggttagcttgtccctcccctccctcttcagcttcccagacactgattctggaatgaaaattcacctgcctctgagttggctcctaatgggggtgggagtgttacttcggttcccaggttggaagattatctcacccggccccagctatataagctgaccggtgtggaggggcccagcagggccaactccagggattccttccacgacagaaaaacatacaagactccttcagccaacatgatggtactgaaagtagaggaactggtcactggaaagaagaatggcaatggggaggcaggggaattccttcctgaggatttcagagatggagagtatgaagctgctgttactttagagaagcaggaggatctgaagacacttctagcccaccctgtgaccctgggggagcaacagtggaaaagcgagaaacaacgagaggcagagctcccaaagaaaaaactagaacaaagatccaagcttgaaaatttagaagaccttgaaataatcattcaactgaagaaaaggaaaaaatacaggaaaactaaagttccagttgtaaaggaaccagaacctgaaatcattacggaacctgtggatgtgcctacgtttctgaaggctgctctggagaataaactgccagtagtagaaaaattcttgtcagacaagaacaatccagatgtttgtgatgagtataaacggacagctcttcatagagcatgcttggaaggacatttggcaattgtggagaagttaatggaagctggagcccagatcgaattccgtgatatgcttgaatccacagccatccactgggcaagccgtggaggaaacctggatgttttaaaattgttgctgaataaaggagcaaaaattagcgcccgagataagttgctcagcacagcgctgcatgtggcggtgaggactggccactatgagtgcgcggagcatcttatcgcctgtgaggcagacctcaacgccaaagacagagaaggagataccccgttgcatgatgcggtgagactgaaccgctataagatgatccgactcctgattatgtatggcgcggatctcaacatcaagaactgtgctgggaagacgccgatggatctggtgctacactggcagaatggaaccaaagcaatattcgacagcctcagagagaactcctacaagacctctcgcatagctacattctgaggcaaacgacagactcttaatcagtaaatgttcactggcattttgaaggcatggcccaggagaagagacactagccataaaatctagtttctatttatcaacgtgttgtgaagatgtacctaatgaagttttgagaaagcacagggttataggtgtttaaatttcctttagtgaaactcttatttatttttatgtattcctgtttatttatttactgccacgctactgatattcagaccttcatgatcatccatctggtgagcagagcttcatttgtatataacactttcagagccttcccacccataggtagttcttaaaccaggtgaaagagcaaagttcaagtgcctacttatgtgtcattcgctcatgtaagagtttttaagagagggctgattatcacagccctcttttctcctgaatttttaatgcagaagtttgaatgaagcaagggaaggcatgtagggacaggaaaggaaacaatggaaggaaagtgattctgtgaaaaggacagtgaagccagctattttacccccaggctggattttttttttttttttttttttttttttttttaccgagtacacagagtacccaagtgaagagaacgtcatgagtgtaagtgcaaatcagtggaaggagcggcaaactgggacatgcagaattgaatttgctcaaaaaaaaaaaaaaaa

SEQ ID NO: 278 - DNA, 208 bp, Homo sapiens
ttttatttttttttttttttagagtttgattgcctttattatgaatataaaatgtacatacaatacaatatacatttatacatttacagtttgcatttcctttcatcttttttgagcaaattcaattctgcatgtcccagtttgccgctccttccactgatttgcacttacactcatgacgttctcttcacttgggtactctgtgtac

SEQ ID NO: 279 - DNA, 202 bp, Homo sapiens
cgagtacacagagtacccaagtgaagagaacgtcatgagtgtaagtgcaaatcagtggaaggagcggcaaactgggacatgcagaattgaatttgctcaaaaaagatgaaaggaaatgcaaactgtaaatgtataaatgtatattgtattgtatgtacattttatattcataataaaggcaatcaaactctaaaaaaaaaaa

SEQ ID NO: 280 - DNA, 441 bp, Homo sapiens
  misc_feature (1)..(441): "n" represents an unknown nucleotide
tacagaatacatatttctttaaatagtttgcagtataaagactaaacaaagctagaggggtactgtatctttaaggcagtaccaatgaatcaatacatttataaaatggaaaagggttagtatggatttcttttcctctttctttctttttttttttctttttggttgctttacattctttcaattaaactttacatttgatttccaaggaagtcacaggcataaaaatctcaaatcaagtttcccctgaataaaaatggacagacatttctctgacgcaaaatcctcttgctcagaaagctaaagtctgtggtgaattcagttcacagatactgcacacttatttgtacaatactttggaggcatttgtagttgtaaaatagaatatacaagtctgtttcacaaaattctaaaaataaaatatatccnggggctattgaa

SEQ ID NO: 281 - DNA, 450 bp, Homo sapiens
  misc_feature (1)..(450): "n" represents an unknown nucleotide
cctatagtgtccccacaaaaatgggatccaaactggaagacatcctgatggacgacaccctttctcccgtcggtgtcactgatccactcctttcctcagtgtcccccggagcttccaaaacaagcagccggagagcagtatgagcatggaagagacggagcacacttgttagcgaatcctccctgcactgcattcgcacaaactgcttcctttcttgattcgtagatttaataacttacctgaaggggttttcttgataattttcctttaatatgaaattttttttcatgctttatcaatagcccaggatatattttatttttangaattttgtgaaacagacttgtatattctattttacaactacaaatggctccaaagtattgtacaaataagtgtggcagtatctgtgaactggatttcaccacagactttagctttctgagcaag

SEQ ID NO: 282 - DNA, 1686 bp, Homo sapiens
ccacgcgtccgggcgtaagccaggcgtgttaaagccggtcggaactgctccggagggcacgggctccgtaggcaccaactgcaaggacccctccccctgcgggcgctcccatggcacagttcgcgttcgagagtgacctgcactcgctgcttcagctggatgcacccatccccaatgcaccccctgcgcgctggcagcgcaaagccaaggaagccgcaggcccggccccctcacccatgcgggccgccaaccgatcccacagcgccggcaggactccgggccgaactcctggcaaatccagttccaaggttcagaccactcctagcaaacctggcggtgaccgctatatcccccatcgcagtgctgcccagatggaggtggccagcttcctcctgagcaaggagaaccagtctgaaaacagccagacgcccaccaagaaggaacatcagaaagcctgggctttgaacctgaacggttttgatgtagaggaagccaagatccttcggctcagtggaaaaccacaaaatgcgccagagggttatcagaacagactgaaagtactctacagccaaaaggccactcctggctccagccggaagacctgccgttacattccttccctgccagaccgtatcctggatgcgcctgaaatccgaaatgactattacctgaaccttgtggattggagttctgggaatgtactggccgtggcactggacaacagtgtgtacctgtggagtgcaagctctggtgacatcctgcagcttttgcaaatggagcagcctggggaatatatatcctctgtggcctggatcaaagagggcaactacttggctgtgggcaccagcagtgctgaggtgcagctatgggatgtgcagcagcagaaacggcttcgaaatatgaccagtcactctgcccgagtgggctccctaagctggaacagctatatcctgtccagtggttcacgttctggccacatccaccaccatgatgttcgggtagcagaacaccatgtggccacactgagtggccacagccaggaagtgtgtgggctgcgctgggccccagatggacgacatttggccagtggtggtaatgataacttggtcaatgtgtggcctagtgctcctggagagggtggctgggttcctctgcagacattcacccagcatcaaggggctgtcaaggccgtagcatggtgtccctggcagtccaatgtcctggcaacaggagggggcaccagtgatcgacacattcgcatctggaatgtgtgctctggggcctgtctgagtgccgtggatgcccattcccaggtgtgctccatcctctggtctccccattacaaggagctcatctcaggccatggctttgcacagaaccagctagttatttggaagtacccaaccatggccaaggtggctgaactcaaaggtcacacatcccgggtcctgagtctgaccatgagcccagatggggccacagtggcatccgcagcagcagatgagaccctgaggctatggcgctgttttgagttggaccctgcgcggcggcgggagcgggagaaggccagtgcagccaaaagcagcctcatccaccaaggcatccgctgaagaccaacccatcacctcagttgttttttatttttctaataaagtcatgtctcccttcatgtttttttttttaaaa

SEQ ID NO: 283 - DNA, 469 bp, Homo sapiens
aaaaaaaaaacatgaagggagacatgactttattagaaaaataaaaaacaactgaggtgatgggttggtcttcagcggatccttggtggatgaggctgcttttggctgcactggccttctcccgctcccgccgccgcgcagggtccaactcaaaacagcgccatagcctcagggtctcatctgctgctgcggatgccactgtggccccatctgggctcatggtcagactcaggacccgggatgtgtgacctttgagttcagccaccttggccatggttgggtacttccaaataactagctgattctgtgcaaagccatggcctgagatgagctccttgtaagggggagaccagaggatggagcacacctgggaatgggcatccacggcactcagacaggccccagagcaaaaattccagatgcgaatgtgtcgatcactggtgcaccctcctgtggcaaggacatttga

SEQ ID NO: 284 - DNA, 3832 bp, Homo sapiens
cgcgaggccggcgctgtgctcgcctcggagatcgctgctctttagctgggtgcagaaggcggctccgcggctcgcggacgactggctgggcgcgaatcagattggggggctttctcccggtcccctcccacctcgtctgggctcgcggcgtctccggggaaagccgtggccccgagggcggatccgagaacacacaagtgaaagacacaatgaatggtcatatttctaatcatcccagtagttttggaatgtacccatctcagatgaatggctacggatcatcacctaccttttcccagacggacagagaacatggttcaaaaacaagtgcaaaggccctttatgaacaaaggaagaattatgcacgggacagtgtcagcagtgtgtcagatatatctcaataccgtgttgaacacttgactacctttgtcctggatcggaaagatgctatgatcactgttgatgatggaataaggaaattgaaattgcttgatgccaagggcaaagtgtggactcaagatatgattcttcaagtggatgacagagctgtgagcctgattgatttagaatcaaagaatgaactggagaattttcctttaaacacaatccagcactgccaagctgtgatgcattcatgcagctatgattcagttcttgcactggtgtgcaaagagccaacccagaacaagccagatcttcatctcttccagtgtgatgaggttaaggcaaacctaattagtgaagatattgaaagtgcaatcagtgacagtaaaggagggaaacagaagaggcggcccgacgccctgaggatgatttccaatgcagaccctagtataccgcctccacccagagctcctgcccctgcgccccctgggaccgtcacccaggtggatgttagaagtcgagtggcagcctggtctgcatgggcagccgaccaaggggactttgagaaaccaaggcagtatcatgagcaggaagaaacacctgagatgatggcagcccgcattgacagagatgtgcaaatcttaaaccacattttggatgacattgaattttttatcacaaaactccaaaaagcagcagaagcattttctgagctttctaaaaggaagaaaaacaagaaaggtaaaaggaaaggaccaggagagggtgttttaacgctgcgggcaaaacctccacctcctgatgaatttcttgactgtttccaaaagtttaaacacggatttaaccttctggccaaactgaagtctcatattcagaatcctagtgctgcagatttggttcactttttgtttactccattaaatatggtggtgcaggcaacaggaggtcctgaactagccagttcagtacttagtcccctattgaataaggacacaattgatttcttaaattatactgtcaatggtgatgaacggcagctgtggatgtcattgggaggaacttggatgaaagccagagcagagtggccaaaagaacagtttattccaccatatgttccacgattccgcaatggctgggagcccccaatgctgaactttatgggagccacaatggaacaagatctttatcaactggcagaatctgtggcaaatgtagcagaacatcagcgcaaacaggaaataaaaagattatccacagagcattccagtgtatcagagtatcatccagccgatggctatgcgttcagtagcaacatttacacaagaggatcccacctggaccaaggggaagctgctgttgcttttaagccaacttctaatcgccatatagatagaaattatgaaccactcaaaacacaacccaagaaatatgccaaatccaagtatgactttgtagcaaggaacaacagtgagctctcggttctaaaggatgatattttagagatacttgatgatcggaagcaatggtggaaagttcgaaatgcaagtggagactctggatttgtgccaaataacattttggatattgtgagacctccagaatctggattggggcgtgctgatccaccttatactcatactatacagaaacaaaggatggagtatggcccaagaccagctgatactccccctgctccatcacctcctccaacaccagctcctgttcctgttccccttcccccttccactccagcacctgttcctgtgtcaaaggtcccagcaaatataacacgtcaaaacagcagctccagtgacagtggtggcagtatcgtgcgagacagccagagacacaaacaacttccggtggaccgaaggaaatctcagatggaggaagtgcaagatgaactcatccacagactgaccattggtcggagtgccgctcagaagaaattccatgtgccacggcagaacgtgccagttatcaatatcacttacgactccacaccagaggatgtgaagacgtggttacagtcaaagggattcaaccctgtgactgtcaatagtcttggagtattaaatggtgcacaacttttctctctcaataaggatgaactgaggacagtctgccctgaaggggcgagagtctatagccaaatcactgtacaaaaagctgcattggaggatagcagtggcagctccgagttacaagaaattatgagaagacgacaggaaaaaatcagtgctgccgctagtgattcaggagtggaatcttttgatgaaggaagcagtcactaatttgtttgtttgtatttaaactccattgtttttggcattattccaacatgctttgttttaagaagccttgaagggaatgtcagattcatttttcttgatgtaatttatcaccataaaaaaaaaacccatgcaaacctgagtgagcacaggatttgcttctaggcccattatttttattaaaactgaaaaaatttaaactgaattttttgaccttggaaaatatttttcttactttaccaaggtgaagtttccttaattagactaattattttatccccatcccagggtataaacaggaattgttttgatagtggtggagttattcactgcaacaaagcaacaatgttgtccatgattcaaaatctaagcagtttcgattttgcctgtgaatatggtgtctgtcattcagggcatagctcactgtaggctagcctctgcttacttaagtctcttctctgacatactcaatggaagaatatttagatttatttaaagttcttaatgccaacagtttaaaaaaaaattaaaacatttgaatgaactgtaaagtacagccataccttggacatgcaaatataaatctatggagcattctcaagacagtttgtcatggctctgttgattgcaactccttgtatagcttgtattttgatttagtttatattctgcttattatgtatactgtgttcttatatatgagaaagcacaaatgcgaaagaggtcatgtcttctcaaaatctagcaaaggaagtagtctgcattggtgtgcattacagtattttgcttaatgaaagcctcagttctgaatgttgatatgagtagttaaaaggaagtggggccattttatgtgtttatctgtgtcaagtatttctggtaataagaagcacttaatttacacatattttaatcctgtgaaagattccacatagagaaaagaaagatacctaaccttcaacaaatgttatttttggaaacacaatttttgtcattaaatgttatattatttcacatatataaaacagatgttatgtaagaatgttgtatattttaacataaatcatttagagaaattatctagattcattaattttcatagtgcctttttcacatgagtcagctggaaagtctgcaataaacagtatttgctgtctgtt

SEQ ID NO: 285 - DNA, 436 bp, Homo sapiens
  misc_feature (1)..(436): "n" represents an unknown nucleotide
ctntaantnatttatgttaaaatatacaacattcttacataacatctgttttatatatgtgaaataatataacatttaatgacaaaaattgtgtttccaaaaataacatttgttgaaggttaggnatctttcttttctctatgtggaatctttcacaggattaaaatatgtgtaaattaaggtgcttcttattaccagaaatacttggacacagataaacacataaaagggccccacttccttttaactactcatatcaacattcaggactgaggggctttcattagggcaaaatactggtaatggcacacccatggcgggcctactttcctttgcngggattttgggggggggcctgggccccctttcgggcnttggggggcctttccccctntttggggggcccccgggttnccctattnggggggggttttta

SEQ ID NO: 286 - DNA, 344 bp, Homo sapiens
  misc_feature (1)..(344): "n" represents an unknown nucleotide
agcttctaggccatntatttttattaaaactgaaaaaatttaaactgaattttttgaccttggaaaatatttttcttactttaccaaggtgaagtttccttaattagactaattattttatccccatcccagggtataaacaggaattgttttgatagtggtggagttattcactgcaacaaagcaacaatgttgtccatgattcaaaatctaagcagtttcggattttgcctgtggaatatgggtgtctgtcattcaggggcatagcttcactgtagggctaggcctctggcttacttaagtctcnttctctggacatactccanggggaggattntttagga

SEQ ID NO: 287 - DNA, 593 bp, Homo sapiens
  misc_feature (1)..(593): "n" represents an unknown nucleotide
tgcatgcatgaaaagctttattaagtcaataagctgttacacttttacaaactgctatgcagagatactcaaacatttttaaatgacatgagaaactactaacatctttagtgagagtcactttcacaattttctctgctcccacacccctaatgatcaacatattcatttttttatttagtatatgtcacgcagcaatttatcaaaagcttttgttgtgaaaacacttttcttaaatacacaattaaaagatatgattaagcacttacaggatgtgaaatatttaaaggtaatacacaataatcgggttaccaaaaggaccgccttccaatttttctttctattcattttgatgttttgttcttttcaaaacattttctctcattacattcattactaaaggccttactttaaatacatcatgctacattttgttctcctcttcaaatgccaatgttttaacaatttgaantctctggcctgggaaaaagaaaagtnatccacntacaaggtanaccgtatggacaccanggatgtnacaggtccaacaacagcccaaatccaccatgtacatgtaacatagtgaatgagcc

SEQ ID NO: 288 - DNA, 456 bp, Homo sapiens
  misc_feature (1)..(456): "n" represents an unknown nucleotide
gnacggcaaccgcgctctgcagcncnacgttatagcccggggcacgcttcgtcctggtctactcagtcaccaagaaggaaaccctggaagagctgaaggccttctatgagctgatctgcaagatcaaaggtaacaacctgcataagttccccatcgtgctggtgggcaataaaagtgatgacacccaccgggagggcncnctngaatgatggtgccacctgtgcgatggagtggaattgcgccttcatggagatttcagccaagaccgatgtgaatgtgcaggagctgttccacatgctgctgaattacaagaaaaagcccaccaccggcctccaggagcccgagaagaaatcccagatgcccaacaccactgagaagctgcttgacaagtgcataatcatgtgagccctgggcctttaagagccagctcttcctatcctgtagcgtgtagaaaan

SEQ ID NO: 289 - DNA, 260 bp, Homo sapiens
ggcaaatttccatttctgtaccaattttctcaagagtccagggatatgggaaaaattatgttttacacacatactgaaatctgaaatctaagtttgaactttgaggagggtttttaagtgtactgccatcagctccctgttttggttggaattttcaacagtgcttcccatccagtgactaggaggctttggaagaacactaggagaaggtggatcactaaactttgccccagcataattttccttttggctcacttcag

SEQ ID NO: 290 - DNA, 3856 bp, Homo sapiens
ttcacatcaaaactcctatactgacctgagacagaggcagcagtgatacccacctgagagatcctgtgtttgaacaactgcttcccaaaacggaaagtatttcaagcctaaacctttgggtgaaaagaactcttgaagtcatgattgcttcacagtttctctcagctctcactttggtgcttctcattaaagagagtggagcctggtcttacaacacctccacggaagctatgacttatgatgaggccagtgcttattgtcagcaaaggtacacacacctggttgcaattcaaaacaaagaagagattgagtacctaaactccatattgagctattcaccaagttattactggattggaatcagaaaagtcaacaatgtgtgggtctgggtaggaacccagaaacctctgacagaagaagccaagaactgggctccaggtgaacccaacaataggcaaaaagatgaggactgcgtggagatctacatcaagagagaaaaagatgtgggcatgtggaatgatgagaggtgcagcaagaagaagcttgccctatgctacacagctgcctgtaccaatacatcctgcagtggccacggtgaatgtgtagagaccatcaataattacacttgcaagtgtgaccctggcttcagtggactcaagtgtgagcaaattgtgaactgtacagccctggaatcccctgagcatggaagcctggtttgcagtcacccactgggaaacttcagctacaattcttcctgctctatcagctgtgataggggttacctgccaagcagcatggagaccatgcagtgtatgtcctctggagaatggagtgctcctattccagcctgcaatgtggttgagtgtgatgctgtgacaaatccagccaatgggttcgtggaatgtttccaaaaccctggaagcttcccatggaacacaacctgtacatttgactgtgaagaaggatttgaactaatgggagcccagagccttcagtgtacctcatctgggaattgggacaacgagaagccaacgtgtaaagctgtgacatgcagggccgtccgccagcctcagaatggctctgtgaggtgcagccattcccctgctggagagttcaccttcaaatcatcctgcaacttcacctgtgaggaaggcttcatgttgcagggaccagcccaggttgaatgcaccactcaagggcagtggacacagcaaatcccagtttgtgaagctttccagtgcacagccttgtccaaccccgagcgaggctacatgaattgtcttcctagtgcttctggcagtttccgttatgggtccagctgtgagttctcctgtgagcagggttttgtgttgaagggatccaaaaggctccaatgtggccccacaggggagtgggacaacgagaagcccacatgtgaagctgtgagatgcgatgctgtccaccagcccccgaagggtttggtgaggtgtgctcattcccctattggagaattcacctacaagtcctcttgtgccttcagctgtgaggagggatttgaattacatggatcaactcaacttgagtgcacatctcagggacaatggacagaagaggttccttcctgccaagtggtaaaatgttcaagcctggcagttccgggaaagatcaacatgagctgcagtggggagcccgtgtttggcactgtgtgcaagttcgcctgtcctgaaggatggacgctcaatggctctgcagctcggacatgtggagccacaggacactggtctggcctgctacctacctgtgaagctcccactgagtccaacattcccttggtagctggactttctgctgctggactctccctcctgacattagcaccatttctcctctggcttcggaaatgcttacggaaagcaaagaaatttgttcctgccagcagctgccaaagccttgaatcagatggaagctaccaaaagccttcttacatcctttaagttcaaaagaatcagaaacaggtgcatctggggaactagagggatacactgaagttaacagagacagataactctcctcgggtctctggcccttcttgcctactatgccagatgcctttatggctgaaaccgcaacacccatcaccacttcaatagatcaaagtccagcaggcaaggacggccttcaactgaaaagactcagtgttccctttcctactctcaggatcaagaaagtgttggctaatgaagggaaaggatattttcttccaagcaaaggtgaagagaccaagactctgaaatctcagaattccttttctaactctcccttgctcgctgtaaaatcttggcacagaaacacaatattttgtggctttctttcttttgcccttcacagtgtttcgacagctgattacacagttgctgtcataagaatgaataataattatccagagtttagaggaaaaaaatgactaaaaatattataacttaaaaaatgacagatgttgaatgcccacaggcaaatgcatggagggttgttaatggtgcaaatcctactgaatgctctgtgcgagggttactatgcacaatttaatcactttcatccctatgggattcagtgcttcttaaagagttcttaaggattgtgatatttttacttgcattgaatatattataatcttccatacttcttcattcaatacaagtgtggtagggacttaaaaaacttgtaaatgctgtcaactatgatatggtaaaagttacttattctagattaccccctcattgtttattaacaaattatgttacatctgttttaaatttatttcaaaaagggaaactattgtcccctagcaaggcatgatgttaaccagaataaagttctgagtgtttttactacagttgttttttgaaaacatggtagaattggagagtaaaaactgaatggaaggtttgtatattgtcagatattttttcagaaatatgtggtttccacgatgaaaaacttccatgaggccaaacgttttgaactaataaaagcataaatgcaaacacacaaaggtataattttatgaatgtctttgttggaaaagaatacagaaagatggatgtgctttgcattcctacaaagatgtttgtcagatatgatatgtaaacataattcttgtatattatggaagattttaaattcacaatagaaactcaccatgtaaaagagtcatctggtagatttttaacgaatgaagatgtctaatagttattccctatttgttttcttctgtatgttagggtgctctggaagagaggaatgcctgtgtgagcaagcatttatgtttatttataagcagatttaacaattccaaaggaatctccagttttcagttgatcactggcaatgaaaaattctcagtcagtaattgccaaagctgctctagccttgaggagtgtgagaatcaaaactctcctacacttccattaacttagcatgtgttgaaaaaaaagtttcagagaagttctggctgaacactggcaacaacaaagccaacagtcaaaacagagatgtgataaggatcagaacagcagaggttcttttaaaggggcagaaaaactctgggaaataagagagaacaactactgtgatcaggctatgtatggaatacagtgttattttctttgaaattgtttaagtgttgtaaatatttatgtaaactgcattagaaattagctgtgtgaaataccagtgtggtttgtgtttgagttttattgagaattttaaattataacttaaaatattttataatttttaaagtatatatttatttaagcttatgtcagacctatttgacataacactataaaggttgacaataaatgtgcttatgttt

SEQ ID NO: 291 - DNA, 486 bp, Homo sapiens
  misc_feature (1)..(486): "n" represents an unknown nucleotide
caacctttatagtgttatgtcaaataggtctgacataagcttaaataaatatatactttaaaaattataaaatattttaagttataatttaaaattctcaataaaactcaaacacaaaccacactggtatttcacacagctaatttctaatgcagtttacataaatatttacaacacttaaacaatttcaaagaaaataacactgtattccatacatagcctgatcacagtagttgttctctcttatttcccagagtttttctgcccctttaaaaggaacctctggctgttctganccttatcacatctctgttttgactgttgggctttggttggttgccagtggttcggccaggaacttctctgggaaactttttttttcaacactggctagggtanggggngtgtagggggggnggtttggtttcntcacantccctcagggtngggggcgggttnggggnattaccggcggggggttttttc

SEQ ID NO: 292 - DNA, 478 bp, Homo sapiens
gcctactatgccagatgcctttatggctgaaaccgcaacacccatcaccacttcaatagatcaaagtccagcaggcaaggacggccttcaactgaaaagactcagtgttccctttcctactctcaggatcaagaaagtgttggctaatgaagggaaaggatattttcttccaagcaaaggtgaagagaccaagactctgaaatctcagaattccttttctaactctcccttgctcgctgtaaaatcttggcacagaaacacaatattttgtggctttctttcttttgcccttcacagtgtttcgacagctgattacacagttcctgtcataaggaatgaataattaattatccagagtttagaggaaaaaaatgactaaaaatattattaacttaaaaaatggacaggtgttggatgcccacaggcaaatgcatgggggggttgtttaatgggtgcaaatccctacttgaatgctctt

SEQ ID NO: 293 - DNA, 304 bp, Homo sapiens
  misc_feature (1)..(304): "n" represents an unknown nucleotide
tactctgatgtttgttttaatgcatcttagtccacacagttggtataaaatcagaaaatgcaaagcaaaaacaaaaggtctggagtcttagcatcagaagggcaccatatatacatctacagttggtggccaatacaagtcattgccagacagtccttggaggcacagaacagcctagacccagccaagctctagggaactcacggtcccaaggagtctagacgcttgttcttgatgctcccgacccgtagggaaaatgtggggagttatgaaggctttattgattttacttcattataggnaa

SEQ ID NO: 294 - DNA, 360 bp, Homo sapiens
  misc_feature (1)..(360): "n" represents an unknown nucleotide
tgttttgttttacccagaaataagataactccatctcgccccttccctttcatctgaaagaagatacctccctcccagtccacctcatttagaaaaccaaagtgtgggtagaaaccccaaatgtccaaaagcccttttctggtgggtgacccagtggcatncaacagaaacagccgctgcccgaacctgtgtgaagctttacgcggcacacggacaaaatgcccaaactgggagcccttggcaaaaacacgggttgttgggcatttggcatactttgccctttacaggtnggagttatctttnggtcaacacatcttaaatggaggnaattcaggtnggacaacaaggtttttngaaatg

SEQ ID NO: 295 - DNA, 438 bp, Homo sapiens
ttgaaacatcattttttatttcttctgagtatctacattcaattgctttagtaaattaacaaaaaacatgcaaatacatgtggtttctggtgacaagttctctaagacagtgtgggaaatgacctaaatatgcacgggcaaggctcagtctccagaggagtcgggcaggggtaggtaggggctgtctgatccccagggcaatgaagttcttagagctgaagcccagctcctcctttttaagaggaaatgacgagccaaagccttctgcgtttgttagagatcctagcttgtggccctgtcagaaccagaatccaggtatcccaattccctgtccactgcccccagcctgaagcccttcatccttcctcttagcaccctctcagggggaacaggggccctaggtatgtttacaaaagtccagaatgggtcagtatttgg

SEQ ID NO: 296 - DNA, 535 bp, Homo sapiens
  misc_feature (1)..(535): "n" represents an unknown nucleotide
ttataaaagtgtgctttattgtaaggaaaatttaaatataaccaacaatactgaaaataatgtacgtggcatttatagccttggtcaaagttctttattaaacaggcgtttgctgttccatgaatagttaacaattagtttatgcaacaaaatagataacttgaaaaagtgagtaagaatacagaatgatgaaccaggaatctggagttcttttgtgttttttcttgtttaacagacatggcttttaaaataaaatctgaaatataaaacaagtcatcttcatgtagagagctctcttttcctacaagaaggttttgcaaaaatgttaaacagtgttctaaaaatgtggctgaagttanactttacatacnttaacntcctatatanaccttcatccaattancattctaaccccatttccanntacagngggaccctaaacattcccagtaagnctccccnggccaggggtaanttcncccctgnaaacanatccattggaanccggttccccaaatggaatcccccctttaaa

SEQ ID NO: 297 - DNA, 495 bp, Homo sapiens
  misc_feature (1)..(495): "n" represents an unknown nucleotide
ctagtatgngttttacttattcagactgataatcatattagtgactatccccatgtaagagggcacttggcaattaaacatgctacacagcatggcatcacttttttttataactcattaaacacagtaaaattttaatcatttttgttttaaagttttctagcttgataagttatgtgctggccttgcctanttggtgaaatggtataaaatatcatatgcagttttaaaactttttatatttttgcaataaagtacattttgactttgttggcataatgtcagtaacatacatattccagtggttttatggacaggcaatttagtcattatgataataaggaaaacagtgttttagatgagagatcnttaatgnntttttcccccatccagccatatancccgcctttttttaatttgccaatccccggtattcccatggcctttaaaaaattggncntggaccatttaaagggccccaagttttggtttttt

SEQ ID NO: 298 - DNA, 255 bp, Homo sapiens
ctagaagggaaaaactttttttaacgtctctgccattttagtgtcatgttactgaaacttcccttccccagtggctcagttcagagccttctgtgtgaagtctttaaacaacggtgtttcagggtcctcaacagcaataagatgggacacctctcagggttctgcttgctcctatttcagtctcttctcactcaggagagtccatgcttcctactggttggcagtttcaggctgacccaacatgggtaaaacaag

SEQ ID NO: 299 - DNA, 402 bp, Homo sapiens
  misc_feature (1)..(402): "n" represents an unknown nucleotide
tatatatgtacattttattagaattcttcagaactgtcaacaattggacaacatacaggaataaaacacgtggaacaccaacatcctttaaacttacgccgcttatgtatttacacataaagttactgtatatataaaaaatattttcaaggactcatgggcttgggaatattcaaaagacattattgctacatttcaatatttacaaaaaaagccacaaaataatttcaaacattaagccactgcaaagaaacatctgatgtaagaaaaaattataaaaatataaactttcaagaatatccaagacaaaactctcaatcgaagtgcccctgaagtacctaggacatctataactaacaaccacttttncttactatcattggagtcaataggaacacaaag

SEQ ID NO: 300 - DNA, 627 bp, Homo sapiens
  misc_feature (1)..(627): "n" represents an unknown nucleotide
cttgtttcttttcacatagctgtctagagtagcttaccagaagcttccatagtggtgcagaggaagtggaaggcatcagtccctatgtatttgcagttcacctgcacnttaaggcattctgttatttagactcatcttactgtacctgttccttagaccttccataatgctactgtctcactgaaacatttaaattttaccctttagactgtagcctggatattattcttgtagtttaccctttagactgtagcctggatattattcttgtagtttacctctttaaaaacaaaacaaaacaaaacaaaaaactccccttcctcactgcccaatataaaaggcaaatgtgtacatggcagagtttgtgtgttgtcttgaaagattcaggtatgttgcctttatggtttcccccttctacatttcttagactacatttagagaactgtggccgttatctggaagtaaccatttgcactggagtctatgctctnggaacctttccaaagttaacagattttgggggtgtgtggcanccaagagattggtggttgccatacttnggctgaaaatccctttggtgttccattgncttcaatggtagtagaaagtgggtgtagtaaagatggc

SEQ ID NO: 301 - DNA, 470 bp, Homo sapiens
tttttttttttttttttttttttggcattcaaaatgtgaactttaataacaggtcagagtgggggttccccaggaacgagaatgacggaactggtgctggaggcctcagggtgcccacttccctgctccaagttctggaggcgaggaggcaatggaccctgttgaggcagggcagtgccagcatccatgtaagtccatctgtctgggtccctgagacccaagatgcagcagtgtgtggagcagggggccgccctgcctgacccgggaggtcctgcagggaatgcggcccaggctggtcgggtgagcaggccaaaggctgtggggtcagatccggaagctttcctcccggccatcgatgtggcggacgcaaggtagacgtccgtgccaatgccctgcagggactgcgactgcaaagacccaccggggtaatccgcgtaggcccgtaaagtggggaacccgaagccaagccc

SEQ ID NO: 302 - DNA, 1783 bp, Homo sapiens
cctctcggagctggaaatgcagctattgagatcttcgaatgctgcggagctggaggcggaggcagctggggaggtccgagcgatgtgaccaggccgccatcgctcgtctcttcctctctcctgccgcctcctgtgtcgaaaataacttttttagtctaaagaaagaaagacaaaagtagtcgtccgcccctcacgccctctcttcctctcagccttccgcccggtgaggaagcccggggtggctgctccgccgtcggggccgcgccgccgagccccagcgccccgggccgcccccgcacgccgcccccatgcatcccttctacacccgggccgccaccatgataggcgagatcgccgccgccgtgtccttcatctccaagtttctccgcaccaaggggctgacgagcgagcgacagctgcagaccttcagccagagcctgcaggagctgctggcagaacattataaacatcactggttcccagaaaagccatgcaagggatcgggttaccgttgtattcgcatcaaccataaaatggatcctctgattggacaggcagcacagcggattggactgagcagtcaggagctgttcaggcttctcccaagtgaactcacactctgggttgacccctatgaagtgtcctacagaattggagaggatggctccatctgtgtgctgtatgaagcctcaccagcaggaggtagcactcaaaacagcaccaacgtgcaaatggtagacagccgaatcagctgtaaggaggaacttctcttgggcagaacgagcccttccaaaaactacaatatgatgactgtatcaggttaagatatagtctgtggatggatcatctgatgatgatccataaatttgatttttgctttgggtgggctcctcttggggatggattatggaatttaaaccatgtcacagctgtgaagatctggcacaagatagaatggtaaaaaaaaaaaaaaattttaagtgacagtgccatagtttggacagtacctttcaatgattaattttaatagcctgtgagtccaagtaaatgatcactttatttgctagggagggaagtcctagggtggtttcagtttctcccagacatacctaaatttttacatcaatccttttaaagaaaatctgtatttcaaagaatctttctctgcagtaaatctcgcaggggaatttgcactattacacttgaaagttgttattgttaaccttttcggcagcttttaataggaaagttaaacgttttaaacatggtagtactggaaattttacaagacttttacctagcacttaaatatgtataaatgtacataaagacaaactagtaagcatgacctggggaaatggtcagaccttgtattgtgtttttggccttgaaagtagcaagtgaccagaatctgccatggcaacaggctttaaaaaagacccttaaaaagacactgtctcaactgtggtgttagcaccagccagctctctgtacatttgctagcttgtagttttctaagactgagtaaacttcttatttttagaaagtggaggtctggtttgtaactttccttgtacttaattgggtaaaagtcttttccacaaaccaccatctattttgtgaactttgttagtcatcttttatttggtaaattatgaactggtgtaaatttgtacagttcatgtatattgattgtggcaaagttgtacagatttctatattttggatgagaaatttttcttctctctataataaatcgtttcttatcttggcatttttaacc

SEQ ID NO: 303 - DNA, 460 bp, Homo sapiens
  misc_feature (1)..(460): "n" represents an unknown nucleotide
aaaatgccaagataagaaacgatttattatagagagaagaaaaatttctcatccaaaatatagaaatctgtacaactttgccacaatcaatatacatgaactgtacaaatttacaccagttcataatttaccaaataaaagatgactaacaaagttcacaaaatagatggtggtttgtggaaaagacttttacccaattaagtacaaggaaagttacaaaccagacctccactttctaaaaataagaagtttactcagtcttagaaaactacaagctagcaaatgtacagagagctggctggtgctaacaccacagtttgagacagtgtctttttaagggtcttttttaaagcctgttgccatggcagattctgggtcacttgctactttcaagggccaaaacaccataccagggtctgaccattttccccaggtcatgcttactaggttggtcntttan

SEQ ID NO: 304 - DNA, 456 bp, Homo sapiens
  misc_feature (1)..(456): "n" represents an unknown nucleotide
gagcgacactgcangaccttcagccagagcctgcaggagctgctggcagaacattataaacatcactggttcccagaaaagccatgcaagggatcgggttaccgttgtattcgcatcaaccataaaatggatcctctgattggacaggcagcacagcggattggactgagcagtcaggagctgttcaggcttctcccaagtgaactcacactctgggttgacccctatgaaagtgtcctacagaattggagaggatggctccatctgtgtgctgtatgaagcctcaccagcaggaggtagcactcaaaacagcaccaaccgtgcaaatggtagacagccgaatcagctgtaaggaggaacttctcttgggcagaacgagcccttccaaaaactacaatatgatgactgtatcaggttaagatatagtctgtggatggatcatctgatgatgatgga

SEQ ID NO: 305 - DNA, 589 bp, Homo sapiens
ttttttttttaagtgaagcaaatattttatttaaatcagtcgtcaaatcacaacttatccaaatgaatgtgttgcaacattgttcttaaaagaatggcacaaatatggcacaaacacaatccagtatctatcaaaataccatttgtaaagaacctgacttatttcatgccatgtgtgaatgcagtccagcatataagagtagaatcaaaaacttacaacaattcttttcttcataacatataaaacatattcactactttgcctcaggattaagcacacttatcggtccaaacaaccataacaagtaggaaaaaggatgtaaagttaatttgctaccagaatataacttctttctaacctccactgggttagaaagaaaaatttcccaatgacaatagaacattctgtatgtttcaaaatgctttttagttttagcacactccgtgtaataggaaagtgaccaatttcagagtaccactaaatatggacctcaatcattagtgaattttaaagaattgtaccttgattcggaatgttacatctaggaggctctgtttttcgtgggttatataactgaggcttaaagctc

SEQ ID NO: 306 - DNA, 606 bp, Homo sapiens
agtgacagtgaatcagataaagcgatcacaccccaagcacaggaggagttacagaaacaagagagagaatctgcaaagtcagaacttacagaatcttaaaacatcatgcagttaaactcattgtctgtttggaagaccagaatgtgaagacaagtagtagaagataatgaatgctgctgctgagactgaagaccagtatttcagaactttgagaattggagagcaggcacatcaactgatctcatttctagagagcccctgacaatcctgaggcttcatcaggagctagagccatttaacatttcctctttccaagaccaacctacaattttcccttgataaccatataaattctgatttaaggtcctaaattcttaacctggaactggagttggcaatacctagttctgcttctgaaactggagtatcattctttacatatttatatgtatgttttaagtagtcctcctgtatctattgtatatttttttcttaatgtttaaggaaatgtgccggatactacatgccttttgtatcccacagtatatgatggggcatgtgcatagtgcaggcttggggagctttaagctcagttatataacccac

SEQ ID NO: 307 - DNA, 2469 bp, Homo sapiens
ttcggcacgagtgcacttcggcagagttgaatgaatgaagagagacgcggagaactcctaaggaggagattggacaggctggactccccattgcttttctaaaaatcttggaaactttgtccttcattgaattacgacactgtccacctttaatttcctcgaaaacgcctgtaactcggctgaagcttcagtacctttatggacaactacagcacaggctacgacgtcaagccaccttgcttgtaccaaatgcccctgtccggacagcagtcctccattaaggtagaagacattcagatgcacaactaccagcaacacagccacctgcccccccagtctgaggagatgatgccgcactccgggtcggtttactacaagccctcctcgcccccgacgcccaccaccccgggcttccaggtgcagcacagccccatgtgggacgacccgggatctctccacaacttccaccagaactacgtggccactacgcacatgatcgagcagaggaaaacgccagtctcccgcctctccctcttctcctttaagcaatcgccccctggcaccccggtgtctagttgccagatgcgcttcgacgggcccctgcacgtccccatgaacccggagcccgccggcagccaccacgtggtggacgggcagaccttcgctgtgcccaaccccattcgcaagcccgcgtccatgggcttcccgggcctgcagatcggccacgcgtctcagctgctcgacacgcaggtgccctcaccgccgtcgcggggctccccctccaacgaggggctctgcgctgtgtgtggggacaacgcggcctgccaacactacggcgtgcgcacctgtgagggctgcaaaggcttctttaagcgcacagtgcaaaaaaatgcaaaatacgtgtgtttagcaaataaaaactgcccagtggacaagcgtcgccggaatcgctgtcagtactgccgatttcagaagtgcctggctgttgggatggtcaaagaagtggttcgcacagacagtttaaaaggccggagaggtcgtttgccctcgaaaccgaagagcccacaggagccctctcccccttcgcccccggtgagtctgatcagtgccctcgtcagggcccatgtcgactccaacccggctatgaccagcctggactattccaggttccaggcgaaccctgactatcaaatgagtggagatgacacccagcatatccagcaattctatgatctcctgactggctccatggagatcatccggggctgggcagagaagatccctggcttcgcagacctgcccaaagccgaccaagacctgctttttgaatcagctttcttagaactgtttgtccttcgattagcatacaggtccaacccagtggagggtaaactcatcttttggaatgggtgggtcttgcacaggttgcaatgcgttcgtggctttggggaatggattgattccattgttgaattctcctccaacttgcagaatatgaacatcgacatttctgccttctcctgcattgctgccctggctatggtcacagagagacacgggctcaaggaacccaagagagtggaagaactccaaaacaagattgtaaattgtctcaaagaccacgtgactttcaacaatggggggttgaaccgccccaattatttgtccaaactgttggggaagctcccagaacttcgtaccctttgcacacaggggctacagcgcattttctacctgaaattggaagacttggtgccaccgccagcaataattgacaaacttttcctggacactttacctttctaagacctcctcccaagcacttcaaaggaactggaatgataatggaaactgtcaagagggggcaagtcacatgggcagagatagccgtgtgagcagtctcagctcaagctgccccccatttctgtaaccctcctagcccccttgatccctaaagaaaacaaacaaacaaacaaaaactgttgctatttcctaacctgcaggcagaacctgaaagggcattttggctccggggcatcctggatttagaacatggactacacacaatacagtggtataaactttttattctcagtttaaaaatcagtttgttgttcagaagaaagattgctataatgtataatgggaaatgtttgcccatgcttggttgttgcagttcagacaaatgtgacacacacacacatacacacacacacacacacacagagacacatcttaaggggacccacaagtattgccctttaacaagacttcaaagttttctgctgtaaagaaagctgtaatatatagtaaaactaaatgttgcgtgggtggcatgagttgaagaaggccaaggcttgtaaatttacccaatgcagtttggctttttaaattattttgtgcctatttatgaataaatattaccaattctaaaagataagtgtgtttcccacaaaaaaaaaaaaaaaa

SEQ ID NO: 308 - DNA, 394 bp, Homo sapiens
ttgcaaacacacttatcttttagaatttgtaatatttattcataaataggcacaaaataatttaaaaagccaaactgcattgggtaaatttacaagcctttgccttcttcaactcatgccacccacgcaacatttagttttactatatattacagctttctttacagcagaaaactttgaagtcttgttaaagggcaatacttgtgggtccccttaagatgtgtctctgtgtgtgtgtgtgtgtgtatgtgtgtgtgtgttacatttgtctgaactgcaacaaccaagcatggccaaacatttcccattataccttatagcaatctttcttctgaacaacaaactgatttttaaactgagaataaaaagtttataccactgtattgtgtgtagt

SEQ ID NO: 309 - DNA, 474 bp, Homo sapiens
  misc_feature (1)..(474): "n" represents an unknown nucleotide
cgcttaattaaagatcttttttttttttttttttttttgcaatgaaaataaatgttttttattaggcagaatccagatgctcaaggcccttcataatatcccccagtttagtagttggacttagggaacaaaggaacctttaatagaaattggacagcaagaaagcgagcttagtgatacttgtgggccagggcattagccacaccagccaccactttctgataggcagcctgcactggtggggtgaattctttgccaaagtgatgggccagcacacagaccagcacgttgcccagggagcctgaagttctcaggatccacgtgcagcttgtcacagtgcagctcactcagtntgggcaaaggtgcccttgaggttntccagggtnagccagggccatcacttaaaggcaccgagcacttttcttgccatgagccttnaccttagggtttgcccntaacagnatcaggagtggg

SEQ ID NO: 310 - DNA, 421 bp, Homo sapiens
  misc_feature (1)..(421): "n" represents an unknown nucleotide
gtgttcactagcaacctcaaacagacaccatggtgcacctgactcctgtggagaagtctgccgttactgccctgtggnaaagngtgaacgtggatgaagttggtggtgaggccctgggaggctgctggtggtctacccttggacccagaggttctttgagtcctttggggatctgtccactcctgatgctgttatgggcaaccctaaggtgaaggctcatggcaagaaagtgctcggtgcctttagtgatggcctggctcacctgggacaacctcaagggcacctttgccacactgagtgagcttgcactgtgacaagctgcacgtggatcctgagaatttcaggctcctgggggcaacgtgctggtctgtgttgctnggcccttcatttnggcaaagatttnaccccaccagtncaggtt

SEQ ID NO: 311 - DNA, 388 bp, Homo sapiens
ttttttttttgcttaactttttattcatcatggcacaagatagaaccttaagaaacaccactgggaatttcatcaccaacatgaaaattaagagtagcatgttttataaaagaaaaaagaatctttttttataatacactttcccttcagaagtgaaaaaaaattgcataaaatactgaagcgtatcgccatctgctggtcaaaaatagttatgcacttgaaaaacttcaaactactaaagtacggtagaacattttacaatacacataaaattacgaaagaaaacatttcctcagcctttggtacaatgtaagtacaaagctgtaggccttttaccaaatgtgatttagtttttaaggaattgcatgtaatttggcaaatactgatt

SEQ ID NO: 312 - DNA, 241 bp, Homo sapiens
tggcaatgtccaatctaaaaacgtccctcttggctctataatataagatacaactcttgcttggtatagcctaaccgtatttatgtgtcttcagttttgactattgtgtattctgtaacagattatgtataatcatatatgatatattcacaaagagaaaacacaaggaacttttaaaaaaaaaatcacttcacttatattaagcaatgagatatactaaacaatgagattctatagaatg

SEQ ID NO: 313 - DNA, 335 bp, Homo sapiens
attatgtaaatgcctttatttgaactactacattgctaccagattacatcacttttcagagttagagtaacataataccttggaaactatagcaaacagcttgacaaagcaagagtacattaattcctacatatatacttttatttttagtgaccacatttctttgtttcaggtgtaaaattaaaaaatatattgtacacttagcatacttggcctaccaaatcccgtctaagttctgagcacactctctcctcaaaagtatcatattcaacagcattttaaatttagagagagagtttgatgatacaggttttaaaacaaataagcatgtattg

SEQ ID NO: 314 - DNA, 416 bp, Homo sapiens
aatgtacatcatattttttatagaagtgattatatcacaaagaaaaatcctgccaaacaactacaaatcaagaatctgtgggcaaaaagctcaattcatacaatgtaaacacattgaaaaaacaaatgcaaaataaaaaaagctgttgatacatcaccttgaaaaattaacacaactaaattaagggctatagaaaatgtgttcagcttatatatcatacacgtcatttaacttgaattttacaatttttaaactaatagaattcagatttattacttgaaataatggtatacccagctgttcttcataatggcaagcatattccatatacaatacaatttatttagcatagttttatactcttaagtaaaatatgttagtggattaaaagcataaaggaataaatatggcccagc

SEQ ID NO: 315 - DNA, 577 bp, Homo sapiens
  misc_feature (1)..(577): "n" represents an unknown nucleotide
gcttaggatttattttccttttaagatgggtaaaagaagtatttaaaatgtgaagagtagctgtaggtatctagaatttacagtttgttaaattttttttaactctaagcatacactctggaaatgattaaactagtaccacataatgaaagtgcatggaactatttgaaagggattttgcaggatcgtggtctttccaaatatcctaatctgttaaatcaattacttgatttacaaccaagtcatagttccccctacctaattgcctttcttgtggatatctatgaagacatgctagaaaatcagtgtgacaataaggaagacattcttaataaagcattangagttatgtgaaatcctagctaaagaaaaggacactataaagaaaggaatattgggagatacattgggaagatnccctcaaagcaaacacagcacagaaaatgactcaccaaccaatggtacagccataacaccatccagaagaacctgatgggatgcctttaattttttaattaggggcccngcaggagtttcncacgaggngggtccctccccttgcccggggggtaaaggg

SEQ ID NO: 316 - DNA, 401 bp, Homo sapiens
ctgggaagacgtgtaactctttgggttattactgtctttacttctaaagaagttagcttgaactgaggagtaaaagtgtgtacatatataatatacccttacattatgtatgagggatttttttaaattatattgaaatgctgccctagaagtacaataggaaggctaaataataataacctgttttctggttgttgttggggcatgagcttgtgtatacactgcttgcataaactcaaccagctgcctttttaaagggagctctagtcctttttgtgtaattcactttatttattttattacaaacttcaagattatttaagtgaagatatttcttcagctctggggaaaatgccacagtgttctcctgagagaacatccttgctttgagtcaggctgtg

SEQ ID NO: 317 - DNA, 193 bp, Homo sapiens
gtgcacatttcccctactgttcacaataagtataaataattactccttttcactttaagaatggataccatgattaacatgagatattaagatatcaagtttcagagaattagatgaatatactgaagttggtttgggtatcgttggaaagaaattgtatagattttgtctgtggaacaaaccttatggtggg

SEQ ID NO: 318 - DNA, 298 bp, Homo sapiens
tttttcttcgtccttttggtttaaaaagtttcacgtcttggtgccttttgtgtgatgcgccttgctgatggcttgacatgtgcaattgtgagggacatgctcacctctagccttaaggggggcagggagtgatgatttgggggaggctttgggagcaaaataaggaagagggctgagctgagcttcggttctccagaatgtaagaaaacaaaatctaaaacaaaatctgaactctcaaaagtctatttttttaactgaaaatgtaaatttataaatatattcaggagttggaatgttg

SEQ ID NO: 319 - DNA, 434 bp, Homo sapiens
gccaaacagtcactttgtttaagcaaacacaagtacaaagtaaaatagaaccacaaaataatgaactgcatgttcataacatacaaaaatcgccgcctactcagtaggtaactacaacattccaactcctgaatatatttataaatttacattttcagttaaaagaatagacttttgagagttcagattttgttttagattttgttttcttacattctggagaaccgaagctcagctcagccctcttccttattttgctcccaaagcctcccccaaatcatcactccctgccccccttaaggctagaggtgagcatgtccctcacaattgcacatgtcaagccatcagcaaggcgcatcacacaaaaggcaccaagacgtgaaactttttaaaccaaaaggacgaagaaaaaacactttcaaaaaaaaaaaaaa

SEQ ID NO: 320 - DNA, 493 bp, Homo sapiens
tttttttttttacagggatgtcttttatttgtatattgatatttcttcacagaaaattaagcaagtggctattctgtcctggattaatccatttggacttggtcccattggtgtccgtggcagcttctgctttgtctgtaggcactggggccttatcttgtgatggttatcacttgagggtcttgctaaggttggagaaaccaatgccaacacaggtcatcagcactttatccccacccttgagttcttcaccacatggcttggtttcaattttaaacataatctggaaaaagctcttcaaatgccgcaaaaattctatcgtgtagggagagagagggcctagcaggactttggtaacatcctgctgtccaagggtcatgagtagtagcccagctttggttggtcgagtctagcatccacccccgtagatttcctccagcagcagtcgggcacagttcctgccaaggtcctctggaagtactgcttgtcccgg

SEQ ID NO: 321 - DNA, 263 bp, Homo sapiens
ggagaaaaattcttctttatttaaaaataccagtaatactgacagacttcaaaagcaattcacgcttccagaatacaaagtacttaatacatattttcaaacctgtttgcatttcaaacaaagttagcgtttttgtaaatcaaatttgataacccgactaaaaatattttccagctttattatttaaggagctgcacagcctttaaagtggggaccaggaggcaggcagaggcagagagactgaatgcacccaggactgcgca

SEQ ID NO: 322 - DNA, 357 bp, Homo sapiens
caagctgcttcgggcagtttattgaggttttcacgttggggtaggggaagtggcacacacatgctcttgctgtgtacacacagtgaaggacctctcccgcaggcaagcacatgcccacagcttgagcacactgtccatgcatctcctgtccccaacaggcagtcgtggcctttggggcctggcaagttccgagctggctacgcccatgcttctccagggtgctggcgacctggcaaggactagggcagtcccccactgcacccccagctcctgaggccaaacccagggcttcccactgcctggcagaggagccctctgtgaccgccaactctccttctgtggtccgggcaggatggt

SEQ ID NO: 323 - DNA, 403 bp, Homo sapiens
ctgtatgcggaggcggttgcgactggcgcggatcggcaggatgtgagggcagcagtagcagcaactgtactcgtcggctgcgctcctgaccggggagcggagccggctgctcacctgctacgtgcaggactaccttgagtgcgtggagtcgctgccccacgacatgcagaggaacgtgtctgtgctgcgagagctggacaacaaatatcaagaaacgttaaaggaaattgatgatgtctacgaaaaatataagaaagatgatgatttaaaccagacgaaacgtctacagcagcttctccagagagcactaattaatagtcaagaattgcgagatgaaacaatacagattgttacacacatgctccaattggtggaaaatcctccaagacaaatggagttacac

SEQ ID NO: 324 - DNA, 491 bp, Homo sapiens
gaactaggcgagaatgaagactattctcagcaatcagactgtcgacattccagaaaatgtcgacattactctgaagggacgcacagttatcgtgaagggccccagaggaaccctgcggagggacttcaatcacatcaatgtagaactcagccttcttggaaagaaaaaaaagaggctccgggttgacaaatggtggggtaacagaaaggaactggctaccgttcggactatttgtagtcatgtacagaacatgatcaagggtgttacactgggcttccgttacaagatgaggtctgtgtatgctcacttccccatcaacgttgttatccaagagaatgggtctcttgttgaaatccgaaatttcctgggtgaaaaatacatccgcagggttcggatgagaaccggtgttgcttgttcagtatctcaagccccagaagatgaattaatccttgaaggaatgacattgagcttggttaaattcagcggctttg

SEQ ID NO: 325 - DNA, 475 bp, Homo sapiens
ttataaggctaaatgtgtttattctgtgatacgtcttaggtaacacgcagtagcccaatgcagaagaatgttccactacagtgttataatacagaaactggcaacaacttcatgccttcaactggagaacagataaattatggtagttcccgtaattgaattctgctacacaggactaaaattaatgaacgagagcttcagatataattatacaataatgagtgaaaaaagctgtagaatgagcaagtatgaggcttaaaaatatataaaacagtactaaagagtagatggtttaggttatacacagtgaaagtacaacaacacaggaatgataaacatcaaattgtggataattgttacctctgggggggaggaatggcaatgtgatctcggagtggcaaaatgtttttattttacaaaagttggtgctgagaacttggatattcagtatgtagtgtcctatgctcgaagtagt

SEQ ID NO: 326 - DNA, 519 bp, Homo sapiens
gtctgcttctgtgatattatctttaagggaggtactgtgccttgttcatacctgtaccccaaattcctaggatggcatctgcccttcaaggggcactaaaatgtattattgaaacagcattctgggcttaaataggtgtatgtatgtgttggttgtgactgtactatttctagtatagtgaactacatactgaatatccaagttctcagcacctacttttgtcaaatcttaacattttgccacttcgagatcacattgccattcctcccctccagaggtaacaattatccacaatttgatgtttatcattcctgtgttgttgtactttcactgtgtataacctaaaccatctactctttagtactgttttatatatttttaagcctcatacttgctcattctacagcttttttcactcattattgtataattatatctgaagctctcgttcattaatgttaggtccggtgtagcaggattcaattacgggaactagcataatgtaacctgttctgcagt

SEQ ID NO: 327 - DNA, 307 bp, Homo sapiens
  misc_feature (1)..(307): "n" represents an unknown nucleotide
tgtatttaaaaaaatttatttgtgatctgtacatgtgataaagtggggtagacctttaaagccaacaaaacaaaaatccaaagtaaaaatgtataaatacaatatatattttcttacaaaaatgggagatttacaaaatatacatactgtacttatcnctattttacaaatttcacatgcacttaaaagatacagcacaaaagatgccaaaacctgtgttggagttttaaaaatctgacagatgagatagttttgaaggttgaagaaacacaagatcgattttaatggaaaaagcagttccactcaa

SEQ ID NO: 328 - DNA, 438 bp, Homo sapiens
  misc_feature (1)..(438): "n" represents an unknown nucleotide
tttctgtaatagaactcggattcttttgcatgatggggtaaagcttagcagagaatcatgggagctaacctttatcccacctttgacactaccctccaatcttgcaacactatcctgtttctcagaacagtttttaaatgccaatcatagagggtactgtaaagtgtacaagttactttatatatgtaatgttcacttgagtggaactgctttttacattaaaatcgatcttgtgtttcttcaaccttcaaaactatctcatctgtcagatttttaaaactccaacacaggttttggcatcttttgtgctgtanttttaagtgcatgtgaaatttgtaaaatagagataagtccagtatgtatattttgtaaacccccatttttgtaagaaaatatatattgtatttatcattttacttggatttgtttgtgntttaa

SEQ ID NO: 329 - DNA, 455 bp, Homo sapiens
  misc_feature (1)..(455): "n" represents an unknown nucleotide
ctctgaagtggtgaattttaatattgtataaaaaatccaacttgttccacaagttacatatgtcctatgattttatgcatacatccatatacatatatcaaggtaaagtccagtacaaaaaaacagcattncctatggccagtgttctacagaagtaagactgtgcaaactttatcgtatagtcaaatgagattgcacactaaggcaggatgaggcagaagcaagttgtgtccacagtatattacaaaataccttgcatagcttattcattctcacctggtaaattcatcttagaattctgaaggatttttttcctagataaattttatacaagttagtgtatacttcttgtctttggttctgtggcaaaccaggtttctcagtactgattgttttaccttcacaacattattggatttaaccantagcccgagctttgggggctctgcactgcg

SEQ ID NO: 330 - DNA, 374 bp, Homo sapiens
  misc_feature (1)..(374): "n" represents an unknown nucleotide
ctaattttgcagtgcaacacagatatctgtttgaagaagacaatcttttacggtctacacaaaagctttcccattcaacaaaaccttcaggaagccctttggaagaaaaacacgatcaatgcaaatgtgaaaaccttatantgttccagaaccttgcaaacgaagaagtaagaaaattaacacagcgcttagaagaaatgacacagagaatggaagccctggaaaatcgcctgagatacagatgaagattagaaatcgcgacacatttgtagtcattgtanncggattacaatgaacgcagtnaagancccaaagctcaggctattgttaaatcnataatgttgtgaagtaaacaatcagtctgagaacctggt

SEQ ID NO: 331 - DNA, 435 bp, Homo sapiens
  misc_feature (1)..(435): "n" represents an unknown nucleotide
ccagtanctnnacataagggaaattaatcagttaatttctgctgacttaggtttcctaaacagcttttagttctcaaggcacagctgtggtaaaaacagagcaaaacacccagccatttattggaattctgcagtacaaaataagcacatgtctctatataatctagtaacaggatagcaacagttaaactgtctcaaacaacagatgtatttgcttgattttccttcctaacttcttttgcatcaggaccgcaagcaaagagcttgtttcccagagtattttggggcaaatcgggaaatacataatgtgggcccattgccacaaaagggaggactggaaatcaatacggaggcaaggcccaaaaggcttcagggatttgggagccggggggtggcccatggatggaaatgccgggaggntccagggaggntagg

SEQ ID NO: 332 - DNA, 316 bp, Homo sapiens
  misc_feature (1)..(316): "n" represents an unknown nucleotide
aacntgtacacagttcntcaagaaaatgnattaatataaagnggattataaatggtgtcannactcatgaactatnttcttgatntnctgcattnatcatggtcanctggctcaaatctgaagcttttggcttnctcgtattgatttcagtctcctttgtggcaatgggcnatttatgtattnccgatttcccaaaatactctggggnaacaagctctttgcttgcgggtcctgatgcaaaaggagttaggggaggggaaatcaaggcaaatncatctgttgttttaggcaggtttactgtttgctatcctgttac

SEQ ID NO: 333 - DNA, 353 bp, Homo sapiens
gggtgttattagagcagaaactatggtccctgcgtcacagggaagcaacctacagagaagcagcagctccccaagagaggagagataagaagccagaagcctcagagtgaacaattgtcctattagggattgctctagagagagaaacctctgggaacgtacccctgtgaggcagcacagcacaatgcttttagaattgtatgagagttgatatatctccatttgttttgcaaaggcaaaaactaagatacagagagattatctgttaaagttatgtatttctttggtaataaagatgctgacagtgttgctggaatgcatttctttaataaagatattgtacaatgaaaaaa

SEQ ID NO: 334 - DNA, 316 bp, Homo sapiens
aattgacttgaattatatttattttaaaaagactgtttctagttgttttgaatgaatccagaacccataaattatatcccagaatactgaaagaatctgatgaaataacacgaccttcgacagtaaatctgagtcaagatgatttggttgaggtagatacagacagatagaagcttcacaagcacaagaatactgttccctggcctatccacagctttgagcacactgcctggcatgtattaatggcttgataagtgtccctgacaaaattccaaaatctatttttttgaagtttgtggacaggtagaaaaggaag

SEQ ID NO: 335 - DNA, 432 bp, Homo sapiens
  misc_feature (1)..(432): "n" represents an unknown nucleotide
actcttctaaggtatttgttatgcctctcttctgggtttttcgttttgccttatcaagtagctcaaattctttctccatggcaacagaaactgcttctatttcgctggctgctgcttctttctctttccttagcatacatgncacanntcccggttaagtctctggctcttaatacgtttagcatcttctttctcctgttgtgctaatctaaagaaggaatcaattcggagctgtgtctgctgggnatcgagttgctttaatacaggaaacagagattcatctgtcttcgttctgttccagccgaaataccgctgacaaaattctctaattttgtcgagatcaggtttcccccacagaaagggatcccttcgagtcatccaccacgggtttgaggtaggcctcgncaaaagctgggttaggaaagccanggg

SEQ ID NO: 336 - DNA, 394 bp, Homo sapiens
  misc_feature (1)..(394): "n" represents an unknown nucleotide
tgattataccgaagaattaccaactgtgggttgtgtaaccgccatggaaattctcaatgaattccctgggcatggctggaacctctcctaaaattctcagaatggtggcatgaagctcaaaaaaatccaaagatangaccnnnaatcctcatgacaccaaagtgaaaaaaaaattacggacattgcaactcacccctggctttcctaacccagctgttgccgaggcctacctcaaacccgtggtggatgactcgaagggatcctttctgtgggggaaacctgatctcgacaaaattagagaattttgtcagcggtatttcggctggaacagaacgaagacagatgaatctctgttttcccgtattaaaagcnactccgattgccagcaagacac

SEQ ID NO: 337 - DNA, 352 bp, Homo sapiens
  misc_feature (1)..(352): "n" represents an unknown nucleotide
tttttttttaaaaatcatatgttattatgaatttttattggatagatatcaggggaaagggataaatccctggagacccatctcccaccctctaggaaccccgngggaaaatccagataggagctagtnctctgaggtacaatatggcagccaattnccatggcaacagcagaaggaggagtctggttggttgtgggggcggtgctggggagccagctggtgccagatggacaaacccagcagaaggcatccccagccgggtgaagctgatgccccgtgcccagggcttcaacctccatatnccagccgcagcctgggtccttncttccagggcctaaaggccccattagct

SEQ ID NO: 338 - DNA, 479 bp, Homo sapiens
  misc_feature (1)..(479): "n" represents an unknown nucleotide
tgggttgtgagggccatggatcaccgggtgcagtccataacggaggcctgactgagaaatggggctgggctccatggctggggcttttgtggtctgaaggaggtgagcatcttgctgaggctgtttcgagagggacccgttgttaacaattaggtngtgaactccacaacggcagcctcttttatccactggccaggtgtgaatgccacccaacataccaggaggaggggacaggtagggtgcagntctgccacatngcccctaacctgccctgctccctccctgcagccttcatctcctcgtcctccaggnagcacaagccattgtggaatctncaccaggtgtacagaacggtgccttctncgtcctgccacttagggacctctnaagtccccnatgtgatgggttnctcagnatgatcaggganttgagcgtaatttcagagctttttaanatcccttnaagaccagggaccaggg

SEQ ID NO: 339 - DNA, 307 bp, Homo sapiens
gtagcccagaggtcctttattttttttttttaacacctattatgccatgaattcatagggaataggttccagcagctcaggctccttcccattggttctcacaaagtgtgcttctctgggtggagcaggctggcgctttagttgaacccaggtacctttctctttggcttctttctttttctgatcattttccttcacacgtttcaggaagctatctcggctcttagagtgcttaatgtgctcaatacgcacattaattctcttggcaagaatcttgcccttaacttgtttgtttacaacaatgcca

SEQ ID NO: 340 - DNA, 287 bp, Homo sapiens
gccggagagtctacaatgttacccagcatgctgttggcattgttgtaaacaaacaagttaagggcaagattcttgccaagagaattaatgtgcgtattgagcacattaagcactctaagagccgagatagcttcctgaaacgtgtgaaggaaaatgatcagaaaaagaaagaagccaaagagaaaggtacctgggttcaactaaagcgccacgctgctccacccagagaagcacactttgtgagaaccaatgggaaggagcctgagctgctggaacctattccctat

SEQ ID NO: 341 - DNA, 594 bp, Homo sapiens
gtcactcctgccttcaccatgaagtccagcggcctcttccccttcctggtgctgcttgccctgggaactctggcaccttgggctgtggaaggctctggaaagtccttcaaagctggagtctgtcctcctaagaaatctgcccagtgccttagatacaagaaacctgagtgccagagtgactggcagtgtccagggaagaagagatgttgtcctgacacttgtggcatcaaatgcctggatcctgttgacaccccaaacccaacaaggaggaagcctgggaagtgcccagtgacttatggccaatgtttgatgcttaacccccccaatttctgtgagatggatggccagtgcaagcgtgacttgaagtgttgcatgggcatgtgtgggaaatcctgcgtttcccctgtgaaagcttgattcctgccatatggaggaggctctggagtcctgctctgtgtggtccaggtcctttccaccctgagacttggctccaccactgatatcctcctttggggaaaggcttggcacacagcaggctttcaagaagtgccagttgatcaatgaataaataaacgagcctatttctctttgcac

SEQ ID NO: 342 - DNA, 528 bp, Homo sapiens
aggctcgtttatttattcattgatcaactggcacttcttgaaagcctgctgtgtgccaagcctttccccaaaggaggatatcagtggtggagccaagtctcagggtggaaaggacctggaccacacagagcaggactccagagcctcctccatatggcaggaatcaagctttcacaggggaaacgcaggatttcccacacatgcccatgcaacacttcaagtcacgcttgcactggccatccatctcacagaaattgggggggttaagcatcaaacattggccataagtcactgggcacttcccaggcttcctccttgttgggtttggggtgtcaacaggatccaggcatttgatgccacaagtgtcaggacaacatctcttcttccctggacactgccagtcactctggcactcaggtttcttgtatctaaggcactgggcagatttcttaggaggacagactccagctttgaaggactttccagagccttccacagcccaaggtgccagagttcccagggcaagca

SEQ ID NO: 343 - DNA, 543 bp, Homo sapiens
tttttacattcaagataaaagatttattcacaccacaaaaagataatcacaacaaaatatacactaacttaaaaaacaaaagattatagtgacataaaatgttatattctctttttaagtgggtaaaagtattttgtttgcgtctacataaatttctattcatgagagaataacaaatattaaaatacagtgatagtttgcatttcttctatagaatgaacatagacataaccctgaagcttttagtttacagggagtttccatgaagccacaaactaaactaattatcaaacacatcagttatttccagactcaaatagatacacattcaaccaataaactgagaaagaagcatttcatgttctctttcattttgctataaagcattttttcttttgactaaatgcaaagtgagagattgtattttttctccttttaattgacctcagaagatgcactatctaattcatgagaaatacgaaatttcaggtgtttatcttcttccttacttttggggtctacaccagcatatcttcatggctg

SEQ ID NO: 344 - DNA, 2388 bp, Homo sapiens
tcctgccccaggcccagcttctctcctgccttccaacgccatggggagcaatctcagcccccaactctgcctgatgccctttatcttgggcctcttgtctggaggtgtgaccaccactccatggtctttggcccagccccagggatcctgctctctggagggggtagagatcaaaggcggctccttccgacttctccaagagggccaggcactggagtacgtgtgtccttctggcttctacccgtaccctgtgcagacacgtacctgcagatctacggggtcctggagcaccctgaagactcaagaccaaaagactgtcaggaaggcagagtgcagagcaatccactgtccaagaccacacgacttcgagaacggggaatactggccccggtctccctactacaatgtgagtgatgagatctctttccactgctatgacggttacactctccggggctctgccaatcgcacctgccaagtgaatggccggtggagtgggcagacagcgatctgtgacaacggagcggggtactgctccaacccgggcatccccattggcacaaggaaggtgggcagccagtaccgccttgaagacagcgtcacctaccactgcagccgggggcttaccctgcgtggctcccagcggcgaacgtgtcaggaaggtggctcttggagcgggacggagccttcctgccaagactccttcatgtacgacacccctcaagaggtggccgaagctttcctgtcttccctgacagagaccatagaaggagtcgatgctgaggatgggcacggcccaggggaacaacagaagcggaagatcgtcctggacccttcaggctccatgaacatctacctggtgctagatggatcagacagcattggggccagcaacttcacaggagccaaaaagtgtctagtcaacttaattgagaaggtggcaagttatggtgtgaagccaagatatggtctagtgacatatgccacataccccaaaatttgggtcaaagtgtctgaagcagacagcagtaatgcagactgggtcacgaagcagctcaatgaaatcaattatgaagaccacaagttgaagtcagggactaacaccaagaaggccctccaggcagtgtacagcatgatgagctggccagatgacgtccctcctgaaggctggaaccgcacccgccatgtcatcatcctcatgactgatggattgcacaacatgggcggggacccaattactgtcattgatgagatccgggacttgctatacattggcaaggatcgcaaaaacccaagggaggattatctggatgtctatgtgtttggggtcgggcctttggtgaaccaagtgaacatcaatgctttggcttccaagaaagacaatgagcaacatgtgttcaaagtcaaggatatggaaaacctggaagatgttttctaccaaatgatcgatgaaagccagtctctgagtctctgtggcatggtttgggaacacaggaagggtaccgattaccacaagcaaccatggcaggccaagatctcagtcattcgcccttcaaagggacacgagagctgtatgggggctgtggtgtctgagtactttgtgctgacagcagcacattgtttcactgtggatgacaaggaacactcaatcaaggtcagcgtaggaggggagaagcgggacctggagatagaagtagtcctatttcaccccaactacaacattaatgggaaaaaagaagcaggaattcctgaattttatgactatgacgttgccctgatcaagctcaagaataagctgaaatatggccagactatcaggcccatttgtctcccctgcaccgagggaacaactcgagctttgaggcttcctccaactaccacttgccagcaacaaaaggaagagctgctccctgcacaggatatcaaagctctgtttgtgtctgaggaggagaaaaagctgactcggaaggaggtctacatcaagaatggggataagaaaggcagctgtgagagagatgctcaatatgccccaggctatgacaaagtcaaggacatctcagaggtggtcacccctcggttcctttgtactggaggagtgagtccctatgctgaccccaatacttgcagaggtgattctggcggccccttgatagttcacaagagaagtcgtttcattcaagttggtgtaatcagctggggagtagtggatgtctgcaaaaaccagaagcggcaaaagcaggtacctgctcacgcccgagactttcacatcaacctctttcaagtgctgccctggctgaaggagaaactccaagatgaggatttgggttttctataaggggtttcctgctggacaggggcgtgggattgaattaaaacagctgcgacaac

SEQ ID NO: 345 - DNA, 535 bp, Homo sapiens
gtcgcagctgttttaattcaatcccacgcccctgtccagcaggaaaccccttatagaaaacccaaatcctcatcttggagtttctccttcagccagggcagcacttgaaagaggttgatgtgaaagtctcgggcgtgacagagtacctgcttttgccgcttctggtttttgcagacatccactactccccagctgattacaccaacttgaatgaaacgacttctcttgtgaactatcaaggggccgccagaatcacctctgcaagtattggggtcagcatagggactcactcctccagtacaaaggaaccgaggggtgaccacctctgagatgtccttgactttgtcatagcctggggcatattgagcatctctctcacagctgcctttcttatccccattcttgatgtagacctccttccgagtcagctttttctcctcctcagacacaaacagagctttgatatcctgtgcagggagcaagctcttcttttgttgctggcaagtggtagttggaggaagcctcaagctcgagt

SEQ ID NO: 346 - DNA, 717 bp, Homo sapiens
agagcgatcatgtcgcacaaacaaatttactattcggacaaatacgacgacgaggagtttgagtatcgacatgtcatgctgcccaaggacatagccaagctggtccctaaaacccatctgatgtctgaatctgaatggaggaatcttggcgttcagcagagtcagggatgggtccattatatgatccatgaaccagaacctcacatcttgctgttccggcgcccactacccaagaaaccaaagaaatgaagctggcaagctacttttcagcctcaagctttacacagctgtccttacttcctaacatctttctgataacattattatgttgccttcttgtttctcactttgatatttaaaagatgttcaatacactgtttgaatgtgctggtaactgctttgcttcttgagtagagccaccaccaccatagcccagccagatgagtgctctgtggacccacagcctaagctgagtgtgaccccagaagccacgatgtgctctgtatccagaacacacttggcagatggaggaagcatctgagtttgagaccatggctgttacagggatcatgtaaacttgctgtttttgttttttctgccgggtgttgtatgtgtggtgacttgcggatttatgtttcagtgtactggaaactttccattttattcaagaaatctgttcatgttaaaagccttgattaaagaggaagtttttataat

SEQ ID NO: 347 - DNA, 455 bp, Homo sapiens
tttttttttttttttttttttttttttttttttttttagattataaaaacttcctctttaatcaaggcttttaacatgaacagatttcttgaataaaatggaaagtttccagtacactgaaacataaatccgcaagtcaccacacatacaacacccggcaggaaaaaacaaaaacagcaagtttacatgatccctgtaacagccatggtctcaaactcagatgcttcctccatctgccaagtgtgttctggatacagagcacatcgtggcttctggggtcacactcagcttaggctgtgggtccacagagcactcatctggctgggctatggtggtggtggctctactcaagaagcaaagcagttaccagcacattcaaacagtgtattgaacatcttttaaatatcaaagtgggaaacaagaaggcaacataataatgttatccggaagatgtt

SEQ ID NO: 348 - DNA, 497 bp, Homo sapiens
tgtgcccaaggacatagccaagctggtccctaaaacccatctgatgtctgaatctgaatggaggaatcttggcgttcacagagtcagggatgggtccattatatgatccatgaaccagaacctcacatcttgctgttccggcgcccactacccaagaaaccaaagaaatgaagctggcaagctacttttcagcctcaagctttacacagctgtccttacttcctaacatctttctgataacattattatgttgccttcttgtttctcactttgatatttaaaagatgttcaatacactgtttgaatgtgctggtaactgctttgcttcttgagtagagccaccaccaccatagcccagccagatgagtgctctgtggacccacagcctaagctgagtgtgaccccagaagccacgatgtgctctggtatcagaacacacttggcagatggaggaagcatctgagtttgggccatggtgttcagggatcctgtaaact

SEQ ID NO: 349 - DNA, 499 bp, Homo sapiens
ttttttttttttaaatttaccatggaataaacattttatttatttgtgtatgtaacatttattgacatctacccactgcaagtatagatgaataagacacagtcacaccataaaggagtttatccttaaaaggagtgaaagacattcaaaaaccaactgcaataaaaaagggtgacataattgctaaatggagtggaggaacagtgcttatcaattctgattgtgcaacaatgatatacaatccaatgaatgaatgaatggatgttctgcctgaagtttctatttctttcttgaattacttctctttccatatagtttctggaatgcctttaatatcatcctgggaaagtttaaaattttggggatctccatttccataggttggatacatcactgcattaggatcagaggaatgtcccatacccaaagaatggccaagttcatgagttgcagcatacaggaagttaatccctagactgctaccatccgtccagcggtc

SEQ ID NO: 350 - DNA, 269 bp, Homo sapiens
  misc_feature (1)..(269): "n" represents an unknown nucleotide
ngttgcagaatactcactatttccaaatagcccaaaatggacttccaaagtggtcacctacaggatcgtatcatatactcgagacttaccgcatattacagtggatcgattagtgtcaaaggctttaaacatgtggggcaaagagatccccctgcatttcaggaaagttgtatggggaactgctgacatcatgattggctttgcgcgaggagctcatggggactcctacccatttgatgggccagganacacgctggctcatgncnttg

SEQ ID NO: 351 - DNA, 433 bp, Homo sapiens
gaagagcaatggtttattgagtcatgtggtaatggcaggttgtctttaaaaaaagaaagaagcatcaaggagagaagccccacaggctaaagagagacatttcactcagaggccaaagtctgggggttagaaagaaggaagcttgacccaaacaaagtttcatttacagtatatacagtcaggccttgggggcaggagctgctggggagcagagagggaccctctatcgctggcttcagggggtgccttgggtcccttcagtagctggtgggcgtgacgtgcaggaagcacatttggcttggcaggagctgtcaggaaggggaagcgggtttcctgcgattctgccttgttctgccctgggtgaagccgcacaccacacctcacctcccaggggcccaggcctgtggaatgtctgttttaagctcctggggct

SEQ ID NO: 352 - DNA, 457 bp, Homo sapiens
  misc_feature (1)..(457): "n" represents an unknown nucleotide
ctggagcgagtccctcagaaattccaccaggctgtcagctgacctcttttgcctgctgctgtgaaggtatagcaccaccccaggtcctcctgcagtgcggcatccccttggcagctgccgtcagccaggccagccccagggagcttaaaacagacattccacagggcctgggccttgggaggtgaggtgtggtgtgcggcttcacccagggcagaacaaggcagaatcgcaggaaacccgcattccccttcctgacagctcctgccaagccaaatgtgcttcctgcagctcacgcccaccaggctactgaagggacccaaggcacccccgttgaagccagcgatagaggggtccgtgtatgcgtccccagcagntccgtcccccagaggcctgactgtatatactgtaaatgaaactttgtttgggtcaagcttccttctttctaacccccaagact

SEQ ID NO: 353 - DNA, 383 bp, Homo sapiens
ttttttttttttttttttattctaaaggggaaggcccctttttattaaacttgtacattttactttccttctttcagaatgctaataaaaaacttttgtttatacttaaaaaaaccataaatcagacaaacaaaagaaacgattccaacatcacttctgtgatgagaaaagaggcaatggaattcaacataagcaaagaaaactctacctggaggaaagaaatcgatcagcgaggaaacaactcggggctgctgccagactgcaggccatgcgaggaggagcctcctagaggatttccaaagcaaacccatccctgccagaccaggaagcagccgtcctacctcccagagaaacagacctcagccctaatgatcactcaaatc

SEQ ID NO: 354 - DNA, 407 bp, Homo sapiens
gtgacctggccaccagcaggaatgcagcggattcctctgtcccaagtgctcccagaaggcaggattctgaagaccactccagcgatatgttcaactatgaagaatactgcaccgccaacgcagtcactgggccttgccgtgcatccttcccacgctggtactttgacgtggagaggaactcctgcaataacttcatctatggaggctgccggggcaataagaacagctaccgctctgaggaggcctgcatgctccgctgcttccgccagcaggagaatcctcccctgccccttggctcaaaggtggtggttctggcggggctgttcgtgatggtgttgatcctcttcctgggagcctccatggtctacctgatccgggtggcacggaggaaccaggagcgtgccctg

SEQ ID NO: 355 - DNA, 476 bp, Homo sapiens
aaccttaaatatttatttgagaaaacaaataaagatccaaatacgtgagttgatcatctgataaaagtaagagttgacaaaaaaggtacatcttctccaatccgaaaacagaaagtgggaaagatcaaggtatcactagaggtcaatgaaacaaaacatacaatagtggatgacaaaagccaatctctgaatctttgaaaagaatataataaatgaacatctgaaaccagtgatcgagaaatgttttagataaggcacaaaaagataccaagaatgttaacactaggctgtacatcctaaaacagtcagatgagctcactgttataattctggttcaccgcaagaaccttagcacaaagaaaggactcaacaaacatttggatccatgaataaaattatcttcccacatataaccacctgcctaaaacattctcctcctccttgaattaaattcaccatgtctgcatcataggagg

SEQ ID NO: 356 - DNA, 510 bp, Homo sapiens
cgccgctgcctctgcggggccgggagaggattcgtctgacagcgaagcggagcaagagggaccccagaaactgatccgcaaagtgtctacctcggggcagatccggaccaagaccagtattaaagagggacagctattgaagcaaaccagttctttccaaaggtggaaaaagcgatacttcaaacttcgaggccgcaccctttactatgcaaaggactcaaagtctctgatatttgatgaagttgacctctcagatgctagtgtagctgaagcaagcacgaaaaatgctaacaacagcttcacggtagatacccagtggtgagattgctgtgtcaaatggtagtacaatttttagttctttgagaaatctctatactgttttccatagatgttgtactaatttacattcacaccaacagtgtacaagcattccctttgctccacattcttgctaatacctgttgttttttgactttttaatgactgctctaagatggtgtctcattgtgg

SEQ ID NO: 357 - DNA, 363 bp, Homo sapiens
tttccagaaaaggatattttttttattcaagtaactgcaaataggaaaccagagagggagccccaggctgggacaaatcatggctacccctccccaacagaacagggggaggaggtggcccctacaccctttatggtcgattcgggcccccttgctcactctgctgcagcatcctaggggcagggccagccttccctgggactggggtagtcggtcacccagcctgccatgccccagcccctcttccccacaaagagtatcttgggggaggggatcgtgggcagaacaggaggcaatgaggatgaacatttggcgctggtagcagcagcaatgacggattgtcgaagaatggaacattgaaca

SEQ ID NO: 358 - DNA, 2613 bp, Homo sapiens
gcgcgccttctccagtccgcggtgccatggcccccgcccgtctgttcgcgctgctgctgctcttcgtaggcggagtcgccgagtcgatccgagagactgaggtcatcgacccccaggacctcctagaaggccgatacttctccggagccctaccagacgatgaggatgtagtggggcccgggcaggaatctgatgactttgagctgtctggctctggagatctggatgacttggaagactccatgatcggccctgaagttgtccatcccttggtgcctctagataaccatatccctgagagggcagggtctgggagccaagtccccaccgaacccaagaaactagaggagaatgaggttatccccaagagaatctcacccgttgaagagagtgaggatgtgtccaacaaggtgtcaatgtccagcactgtgcagggcagcaacatctttgagagaacggaggtcctggcagctctgattgtgggtggcatcgtgggcatcctctttgccgtcttcctgatcctactgctcatgtaccgtatgaagaagaaggatgaaggcagctatgacctgggcaagaaacccatctacaagaaagcccccaccaatgagttctacgcgtgaagcttgcttgtgggcactggcttggactttagcggggagggaagccaggggattttgaagggtggacattagggtagggtgaggtcaacctaatactgacttgtcagtatctccagctctgattacctttgaagtgttcagaagagacattgtcttctactgttctgccaggttcttcttgagctttgggcctcagttgccctggcagaaaaatggattcaacttggcctttctgaaggcaagactgggattggatcacttcttaaacttccagttaagaatctaggtccgccctcaagcccatactgaccatgcctcatccagagctcctctgaagccagggggctaacggatgttgtgtggagtcctggctggaggtcctcccccagtggccttcctcccttcctttcacagccggtctctctgccaggaaatgggggaaggaactagaaccacctgcaccttgagatgtttctgtaaatgggtacttgtgatcacactacgggaatctctgtggtatatacctggggccattctaggctctttcaagtgacttttggaaatcaaccttttttatttgggggggaggatggggaaaagagctgagagtttatgctgaaatggatttatagaatatttgtaaatctatttttagtgtttgttcgtttttttaactgttcattcctttgtgcagagtgtatatctctgcctgggcaagagtgtggaggtgccgaggtgtcttcattctctcgcacatttccacagcacctgctaagtttgtatttaatggtttttgtttttgtttttgtttgtttcttgaaaatgagagaagagccggagagatgatttttattaattttttttttttttttttttttactatttatagctttagatagggcctcccttcccctcttctttctttgttctctttcattaaaccccttccccagttttttttttatactttaaaccccgctcctcatggccttggccctttctgaagctgcttcctcttataaaatagcttttgccgaaacatagtttttttttagcagatcccaaaatataatgaaggggatggtgggatatttgtgtctgtgttcttataatatattattattcttccttggttctagaaaaatagataaatatatttttttcaggaaatagtgtggtgtttccagtttgatgttgctgggtggttgagtgagtgaattttcatgtggctgggtgggtttttgcctttttctcttgccctgttcctggtgccttctgatggggctggaatagttgaggtggatggttctaccctttctgccttctgtttgggacccagctggtgttctttggtttgctttcttcaggctctagggctgtgctatccaatacagtaaccacatgcggctgtttaaagttaagccaattaaaatcacataagattaaaaattccttcctcagttgcactaaccacgtttctagaggcgtcactgtatgtagttcatggctactgtactgacagcgagagcatgtccatctgttggacagcactattctagagaactaaactggcttaacgagtcacagcctcagctgtgctgggacgacccttgtctccctgggtaggggggggggaatgggggagggctgatgaggccccagctggggcctgttgtctgggaccctccctctcctgagaggggaggcctggtggcttagcctgggcaggtcgtgtctcctcctgaccccagtggctgcggtgaggggaaccaccctcccttgctgcaccagtggccattagctcccgtcaccactgcaacccagggtcccagctggctgggtcctcttctgcccccagtgcccttccccttgggctgtgttggagtgagcacctcctctgtaggcacctctcacactgttgtctgttactgattttttttgataaaaagataataaaacctggtactttctaaaaaaaaaaaaaaaaaaa

SEQ ID NO: 359 - DNA, 323 bp, Homo sapiens
  misc_feature (1)..(323): "n" represents an unknown nucleotide
agaaagtaccaggttttattatctttttatcaaaaaaaatcagtaacagacaacagtgtgagaggtgcctacagaggaggtgctcactccaacacagcccaaggggaagggcactgggggcagaagaggacccagccagctgggaccctgggttgcagtggtgacgggagctaatggccactggtgcagcaagggagggtggttcccctcaccgcagccactggggtcaggaggagacacgacctgcccaggctaagccaccaggnctcccctctcagggagacaagggtcgtcccagcacagctgaggctgtgactcgttaa

SEQ ID NO: 360 - DNA, 376 bp, Homo sapiens
  misc_feature (1)..(376)
  misc_feature (1)..(376): "n" represents an unknown nucleotide
cgttggacagcactattctagagaactaaactggcttaacgagtcacagcctcagctgtctgggacgacccttgtctccctgagaggggaggcctggtggnttagctgggcaggtcgtgtctcctcctgaccccagtggctgcggtgaggggaaccaccctcccttgctgcaccagtggccattagctcccgtcaccactgcaacccagggtcccagctggctgggtcctcttctgcccccagtgcccttccccttgggctgtgttggagtgagcacctcctctgtaggcacctctcacactgttgtctgttactgattttttttgataaaaagataataaaacctggtactttctaaaaaaaaaaaaaaaaaaag

SEQ ID NO: 361 - DNA, 533 bp, Homo sapiens
tcttttttacatttttataagaatatataaaaaatgatataaatggacatttacggtagtgggggaaggcatatatctacgttaaaaggcaggacatttttaaaagctctattttctaaatgaaaactacgaaagcgtggtgggttgtggcgggggcagttgtggccctgtaggaccttcggtgactgatgatctaagtttccggaggtttctcagagcctctctggttctttcaatcggggatgtctgagggaccttccgcggcatctatgcgggcatggttactgcctctggtgccccccgcagccgccgcaggtaccgtgcgacatcgcgatggcccagctcctcagccaggtccacgggcagacggcccaggcatcgcgcacgtccagccgcgccccggcccggttgcagcaccaccagcgtgtccaggaagccttcccggcagcgtcgtgcaacggtcgggtgagagtggcggggtcggcgcaatttggcatccgcgcgtggagcaggagcagctccgccactcgggg

SEQ ID NO: 362 - DNA, 130 bp, Homo sapiens
tttttccttcatgcaacaaacatttattgagctcctgcctacttgctccaagcaggatgatgggctagacatggagcatacataaacgggcaagattcagtccctgaccgcaagcacttacagtctagtt

SEQ ID NO: 363 - DNA, 402 bp, Homo sapiens
gtgccagcccccgactggcctggccacactgctctccagtagcacagatgtctgctcctcctcttgaacttgggtgggaaaccccacccaaaagccccctttgttacttaggcaattccccttccctgactcccgagggctagggctagagcagacccgggtaagtaaaggcagacccagggctcctctagcctcatacccgtgccctcacagagccatgccccgtcacctctgccctgtgtctttcatacctctacatgtctgcttgagatatttcctcagcctgaaagtttccccaaccatctgccagagaactcctatgcatcccttagaaccctgctcagacaccattacttttgtgaacgcttctgccacatcttgtcttccccaaaattgatcact

SEQ ID NO: 364 - DNA, 491 bp, Homo sapiens
  misc_feature (1)..(491): "n" represents an unknown nucleotide
tttttttttttntttcactgttcaaggtttattgggggttttagttggtataacacttggatagttggttgcattgtttgtatgtagatctttttacattatatggtaatgtacactactgatatagttcacaaaataagatcctttggaaganttatacacaagacatgatattggatttatacactggatcccagggatgtgactcactgggaaaaaatgttggactaggcatgttcagtgaaggagccaggnagttatataacacacggtaaacatccacctggctcaaggggcaaatgcagtacgtacagcattggcagtggtgcgtcagaggtggcagaactntttcacactaaccagttgangactacacaagattaataccatccagcatcaggntatagcntgtggattttacaaaccatttcttatttctaactttcaggngttgatgtttttcccagtccntcttaaaatttttactgctt

SEQ ID NO: 365 - DNA, 352 bp, Homo sapiens
  misc_feature (1)..(352): "n" represents an unknown nucleotide
tttttgtgcggtgtctggtttattcaaagtggctgtcagaggcccgaccatggagcaggaaccaaatagttgggagctgtggggctgaacagggcagggatttccaggtatcagaaggtaaaaggaggtcagctgagcagccacagcagcattagggccaggctaagcaggaaaggccaggntgcccagggcccagccccactcatggctgcagcatagaacctcgccacctcctcattggggttgccctggggctgggtcgaaccacatntgggatgcagcggccactncctcggctgtagttncttacctttttnggagttangtccaaanttttcattttcnaaagaac

SEQ ID NO: 366 - DNA, 379 bp, Homo sapiens
  misc_feature (1)..(379): "n" represents an unknown nucleotide
ctgctgagtggccttcgcccaatcccaggctccactcctgggctccattnccactccctgcctgtctcctaggccactaaaccacagctgtcccctggaataaggcaagggggagtntagagcagagcagaagcctgagccagacggagagccacctcctctcccagggacagacatggctcagcggatgacaacacagctgctgctccttctagtgtggggtggctgtagtaggggaggctcagacaaggattgcattnggccagggacttagctttttcaatatcttncatttaacgnccaagcaccacaagggaaaagccaggggnccccagggacaagtttncattgagcagttttcgaccctggggagggaaga

SEQ ID NO: 367 - DNA, 1835 bp, Homo sapiens
accagctagttccgcttgaaaaccacttctggccccgtgggggactcaagtcgccaagcgagggttcccctgagcgccggagctcacaggtctcgccttgtcccgaaagccccgcaatcgaggcggaggcgaccgagcccccgactctcctagaacgttgccacaagaagggggaacgtcggaacagtgcatcatcgggcggcggccggggcggcggcaggagggcgggcggggggcagggctccgggggactgggcgggccatggcggaggacggcgaggaggcggagttccacttcgcggcgctctatataagtgggcagtggccgactgcgcgcgacactgaccttcagcgcctcggctcggccatggcgccctccaggaagttcttcgttgggggaaactggaagatgaacgggcggaagcagagtctgggggagctcatcggcactctgaacgcggccaaggtgccggccgacaccgaggtggtttgtgctccccctactgcctatatcgacttcgcccggcagaagctagatcccaagattgctgtggctgcgcagaactgctacaaagtgactaatggggcttttactggggagatcagccctggcatgatcaaagactgcggagccacgtgggtggtcctgggacactcagagagaaggcatgtctttggggagtcagatgagctgattgggcagaaagtggcccatgctctggcagagggactcggagtaatcgcctgcattggggagaagctagatgaaagggaagctggcatcactgagaaggttgttttcgagcagacaaaggtcatcgcagataacgtgaaggactggagcaaggtcgtcctcgcctatgagcctgtgtgggccattggtactggcaagactgcaacaccccaacaggcccaggaagtacacgagaagctccgaggatggctgaagtccaacgtctctgatgcggtggctcagagcacccgtatcatttatggaggctctgtgactggggcaacctgcaaggagctggccagccagcctgatgtggatggcttccttgtgggtggtgcttccctcaagcccgaattcgtggacatcatcaatgccaaacaatgagccccatccatcttccctacccttcctgccaagccagggactaagcagcccagaagcccagtaactgccctttccctgcatatgcttctgatggtgtcatctgctccttcctgtggcctcatccaaactgtatcttcctttactgtttatatcttcaccctgtaatggttgggaccaggccaatcccttctccacttactataatggttggaactaaacgtcaccaaggtggcttctccttggctgagagatggaaggcgtggtgggatttgctcctgggttccctaggccctagtgagggcagaagagaaaccatcctctcccttcttacaccgtgaggccaagatcccctcagaaggcaggagtgctgccctctcccatggtgcccgtgcctctgtgctgtgtatgtgaaccacccatgtgagggaataaacctagcactaggtcttgtggtttgtctgccttcactggacttgcccagataatcttcctttttgaggcagctatataaatgatcatttgtgcaagaaaaaaaaaaaaacaagaacaggtttctataacaacatctcttactatttttacttgaaaaaatgttttgcgtagcagactgtcatagccttgaacgccggctccctttcttcctccctccaagtggctctggggctgttgatttccgcagagctgggttggggtaggggctcagcccaccagctttcag

SEQ ID NO: 368 - DNA, 638 bp, Homo sapiens
tacaagacctagtggcaggtttattcccgcacatgggtggttcacatacacagcacagaggcacgggcaccatgggagagggcagcactcctgccttctgaggggatcttggcctcacggtgtaagaagggagaggatggtttctcttctgccctcactagggcctagggaacccaggagcaaatcccaccacgccttccatctctcagccaaggagaagccaccttggtgacgtttagttccaaccattatagtaagtggagaagggattggcctggtcccaaccattacagggtgaagatataaacagtaaaggaagatacagtttggatgaggccacaggaaggagcagatgacaccatcagaagcatatgcagggaaagggcagttactgggcttctgggctgcttagtccctggcttggcaggaagggtagggaagatggatggggctcattgtttggcattgatgatgtccacgaattcgggcttgatggaagcacccccacaaggaagccatccacatcaggctggcctggcaactcctctgcaggtttgcccagtcacagagcctccataaagatacgggtggtctgagcgacgcatcagagacgttagactttagcatcctcggagctt

SEQ ID NO: 369 - DNA, 437 bp, Homo sapiens
aaccagagagttgtgagtttattaagggagatctagtgcttatcctagaatcagcccttgctgcctatgatcttcttgatccagtccaggtagcggcagatgttggtatagacgccaggtttgtcggacctcccacaggggtctgagccccaggatgtgatgccctggagtgcaccatcacacaccagggggcctccagaatcgccctggcacgtgtcagcccctttgctgctgcctgcacagaccatgccatctgtgatctgccccgggtaagcatcctcacacttcttctggggaaagatttttacttctgcacagttgagagtgtcaggaaaattctctcggggactggtgacagtgccccagcctgagatggtgcacttctggccaggctgggtgcaatgatctgccaggctgatgggcttcactttgtgacc

SEQ ID NO: 370 - DNA, 421 bp, Homo sapiens
tttttttttttttttttttttttttaatgtagaaaccacatttattaaccatggatttactgagggcagtttattaggtattatccatcgcttatgctgacatctgattttgcagagaaattatagccattattttattaagataattctacgagatcaatttagtttcttgaagtagcatatattcaattcttcaatagggtttggtttaatttagctatcaaagtcagatgtctctaaactttacacactaaactcatcgtgagcagaaaatttattctttgtacatattccttctgttttggttcttcaagctgaaacatctcaacttccagaaatatggttgccagatcaaaaataccagagtcctaagggttaagatttgaatcgagaaaaagatacatgtacacattgtattata

SEQ ID NO: 371 - DNA, 521 bp, Homo sapiens
  misc_feature (1)..(521): "n" represents an unknown nucleotide
gcacgagggttagtgtacgaactggaggattggctgacaagagctcaaggaaaacatacacttttgatatggtgtttggagcatctactaaacagattgatgtttaccgaagtgttgtttgtccaattctggatgaagttattatgggctataattgcactatctttgcgtatggccaaactggcactggaaaaacttttacaatggaaggtgaaaggtcacctaatgaagagtatacctgggaagaggatcccttggctggtataattccacgtacccttcatcaaatttttgagaaacttactgataatggtactgaattttcagtcaaagtgtctctgttggagatctataatgaagagctttttgatcttcttaatccatcatctgatgtttctgagagactacagatgtttgatgatccccgtaacaagagaggagtgataattaaaggtttagaaganattacagtacacaacaaggatgaagtctatcaaattttagaaaagggggcaccaaaa

SEQ ID NO: 372 - DNA, 447 bp, Homo sapiens
  misc_feature (1)..(447): "n" represents an unknown nucleotide
gagagtggccagcattaacaactcttttatttgaaaacgtgggtggctctgaaaagagctntttgagttcacaggtgccccttcgagacgcgggccgggctgggcacttggcgtgacagtcagcctcacttgccctttgccttgtggtgactctccgtcttcttagggagcagtacggcctggatgttaggcaagacgccgccntggggagtggtgactttgcccagcagcttgttcagtncctcgtcgttgcggatggccagctnggatggtgacgagggatgatgcngcgtcttcttgttgtcccgagccgcgttgcccgccagcttccaggatctctggcggtcagatactcgaggaccgcagccatntaagacgggcgcgccgggcccccacttcgcttccgctnagtttgcctttgcgcacaagcgattgcactcgccctac

SEQ ID NO: 373 - DNA, 169 bp, Homo sapiens
  misc_feature (1)..(169): "n" represents an unknown nucleotide
ggctcggtgactactatcgctgtcatgtctggtcgtggcaagcaaggaggcaaggccgcgccaaggccaagtcgcgctcgtcccgcgctggccttcagttcccggtagccgagtgcatcgcttgctgcgcaaaggcaactacgcggnagtcngctgnccggcncgccgt

SEQ ID NO: 374 - DNA, 270 bp, Homo sapiens
  misc_feature (1)..(270): "n" represents an unknown nucleotide
catcaaaatagtttattgtgttcagaaaaatcacagtttgaggaaaccttaaacaataagtacacaagagatgccccatggnattnccatagcagagacagactcctgtatgttttattccagaggcattgcatggngataataaaatgataggaantagaggaaantagatacaggaaaaggcantagacagggangccagctagatgttagagtacggagcattcgaggaggcntaaccacanttgggggtggctttagggctgggaa

SEQ ID NO: 375 - DNA, 413 bp, Homo sapiens
gctctactgactcccaaaagagcgcccaagaagaaaatggccataagtggagtccctgtgctaggatttttcatcatagctgtgctgatgagcgctcaggaatcatgggctatcaaagaagaacatgtgatcatccaggccgagttctatctgaatcctgaccaatcaggcgagtttatgtttgactttgatggtgatgagattttccatgtggatatggcaaagaaggagacggtctggcggcttgaagaatttggacgatttgccagctttgaggctcaaggtgcattggccaacatagctgtggacaaagccaacctgggaaatcatggacaaagcgctccaacttattacttccgattcaccaatgttacctccagaggtaaacttgttgcttcacggaacagccctgt

SEQ ID NO: 376 - DNA, 320 bp, Homo sapiens
  misc_feature (1)..(320): "n" represents an unknown nucleotide
gagcattaggggcaacaagggagccctgggcatctggggacaaggcctggcatttgcctggacagtggccctgcaagcagccaaggatggggtctccaccacctggtttacttgaaagtgtggctctcggctccgcccgcccaaagcctttagcccaaaacatggctgcgtacgagggtggttgcagtagggtttgccttcgtgctcagcgtggcccccagaggtcagcgtcttcccacatttctcgcacttcaggcagggcgantgccagtccttgcccagagaggtcaccctctcggcgaagtacacctccttgttgc

SEQ ID NO: 377 - DNA, 470 bp, Homo sapiens
ttctttataaatatttttatttcctatcttatggttacatatatattctttatgtgctccccttgtacatctattcacatgtgacttccatatgataactgctttgatatttaagcatgtgctaaaagttatcttagttgagatatgaaaaatgctttagatggataacattctgagtatattggattagtcacagcagaatttactttagttagatgagttctacaaatttaaagctttgaaaagctactacttttacttctaatacatccagatgaacacgatgtagcaatatcagcttgtattccagagaaatctcattagtttttctggtgatggaaccacttatccacgtctgttggtactgtgcaggcagattcccagggtggtggtaaagcatccacaatggctctggcagcatcaggatcacacttgaaggggctctcagacaaagttgtattcatgcaact

SEQ ID NO: 378 - DNA, 277 bp, Homo sapiens
tgcaaatatttttatcatttcgtgggttgcctttttactttcttgataatgttcttcgacatataaaagctttgatttttgtgaagtccgatttatccattttatttgttgcctatgcttttgttgttacaaccaagaaatcattgggaaatccagtatcatgaagcttttcttctaagagttgtgtagtttttctcttacatttagatctttgatctattgtgggttaatttttgtacatggtgttaggtaaaggttccaatcttcttgcccttgg

SEQ ID NO: 379 - DNA, 346 bp, Homo sapiens
caatctgaagggaaattaagaaaaaaatttcaatttatattaacatcaaaaagaataaaatatttaggaataagtttaatcaaagaggtgaaatgattatacctgaaatctacaaaatattgctgaaagaaatgaaagatgacatcaataaattgaaagacattttgtgttcatgaattggaagactcaatattgttaggagaacagtgctacccaaagtgaccgcagattcaatacaattcctatcagattctcagtggcatttttgcagaaaaagaaaaatctgtcctaaaatttatattgtatctcatgactctaaatagacacacagctttgaagaggaaga

SEQ ID NO: 380 - DNA, 2856 bp, Homo sapiens
tagtcgcgggtccccgagtgagcacgccagggagcaggagaccaaacgacgggggtcggagtcagagtcgcagtgggagtccccggaccggagcacgagcctgagcgggagagcgccgctcgcacgcccgtcgccacccgcgtacccggcgcagccagagccaccagcgcagcgctgccatggagcccagcagcaagaagctgacgggtcgcctcatgctggctgtgggaggagcagtgcttggctccctgcagtttggctacaacactggagtcatcaatgccccccagaaggtgatcgaggagttctacaaccagacatgggtccaccgctatggggagagcatcctgcccaccacgctcaccacgctctggtccctctcagtggccatcttttctgttgggggcatgattggctccttctctgtgggccttttcgttaaccgctttggccggcggaattcaatgctgatgatgaacctgctggccttcgtgtccgccgtgctcatgggcttctcgaaactgggcaagtcctttgagatgctgatcctgggccgcttcatcatcggtgtgtactgcggcctgaccacaggcttcgtgcccatgtatgtgggtgaagtgtcacccacagcctttcgtggggccctgggcaccctgcaccagctgggcatcgtcgtcggcatcctcatcgcccaggtgttcggcctggactccatcatgggcaacaaggacctgtggcccctgctgctgagcatcatcttcatcccggccctgctgcagtgcatcgtgctgcccttctgccccgagagtccccgcttcctgctcatcaaccgcaacgaggagaaccgggccaagagtgtgctaaagaagctgcgcgggacagctgacgtgacccatgacctgcaggagatgaaggaagagagtcggcagatgatgcgggagaagaaggtcaccatcctggagctgttccgctcccccgcctaccgccagcccatcctcatcgctgtggtgctgcagctgtcccagcagctgtctggcatcaacgctgtcttctattactccacgagcatcttcgagaaggcgggggtgcagcagcctgtgtatgccaccattggctccggtatcgtcaacacggccttcactgtcgtgtcgctgtttgtggtggagcgagcaggccggcggaccctgcacctcataggcctcgctggcatggcgggttgtgccatactcatgaccatcgcgctagcactgctggagcagctaccctggatgtcctatctgagcatcgtggccatctttggctttgtggccttctttgaagtgggtcctggccccatcccatggttcatcgtggctgaactcttcagccagggtccacgtccagctgccattgccgttgcaggcttctccaactggacctcaaatttcattgtgggcatgtgcttccagtatgtggagcaactgtgtggtccctacgtcttcatcatcttcactgtgctcctggttctgttcttcatcttcacctacttcaaagttcctgagactaaaggccggaccttcgatgagatcgcttccggcttccggcaggggggagccagccaaagtgataagacacccgaggagctgttccatcccctgggggctgattcccaagtgtgagtcgccccagatcaccagcccggcctgctcccagcagccctaaggatctctcaggagcacaggcagctggatgagacttccaaacctgacagatgtcagccgagccgggcctggggctcctttctccagccagcaatgatgtccagaagaatattcaggacttaacggctccaggattttaacaaaagcaagactgttgctcaaatctattcagacaagcaacaggttttataatttttttattactgattttgttatttttatatcagcctgagtctcctgtgcccacatcccaggcttcaccctgaatggttccatgcctgagggtggagactaagccctgtcgagacacttgccttcttcacccagctaatctgtagggctggacctatgtcctaaggacacactaatcgaactatgaactacaaagcttctatcccaggaggtggctatggccacccgttctgctggcctggatctccccactctaggggtcaggctccattaggatttgccccttcccatctcttcctacccaaccactcaaattaatctttctttacctgagaccagttgggagcactggagtgcagggaggagaggggaagggccagtctgggctgccgggttctagtctcctttgcactgagggccacactattaccatgagaagagggcctgtgggagcctgcaaactcactgctcaagaagacatggagactcctgccctgttgtgtatagatgcaagatatttatatatatttttggttgtcaatattaaatacagacactaagttatagtatatctggacaagccaacttgtaaatacaccacctcactcctgttacttacctaaacagatataaatggctggtttttagaaacatggttttgaaatgcttgtggattgagggtaggaggtttggatgggagtgagacagaagtaagtggggttgcaaccactgcaacggcttagacttcgactcaggatccagtcccttacacgtacctctcatcagtgtcctcttgctcaaaaatctgtttgatccctgttacccagagaatatatacattctttatcttgacattcaaggcatttctatcacatatttgatagttggtgttcaaaaaaacactagttttgtgccagccgtgatgctcaggcttgaaatcgcattattttgaatgtgaagggaa

SEQ ID NO: 381 - DNA, 440 bp, Homo sapiens
  misc_feature (1)..(440): "n" represents an unknown nucleotide
actataacttagtgtctgtatttaatattgacaaccaaaaatatatatanttttnttgcatctatacacaacagggcaggagtctccatgtnttcttgagcagtgagtttgcaggctcccacaggccctcttctcatggtaatagtgtggccctagtgcaaaggagactagaacccggcagcccagactggcccttcccctctcctccctgcactccagtgcttcccaactggtctcaggtaaagaaagnttantttgagtggttgggtaggaagagatgggaaggggcaaatcctaatgggagcctgacccctagagtggggagttccagggccagcagaacgggtgggccatagccctncctggggntagaagctttgtagttcatagttcgattagtntgtccntagggcatnaggtnccagccctacagattagct

SEQ ID NO: 382 - DNA, 485 bp, Homo sapiens
  misc_feature (1)..(485): "n" represents an unknown nucleotide
nacttaacggctccaggattttaacaaaagcaagactgttgctcaaatctattcagacaagcaacaggttttataatttttttattactgattttgttatttttatatcagcctgagtctcctgtgcccacatcccaggcttcaccctgaatggttccatgcctgagggtggagactaagccctgtcgagacacttgccttcttcacccagctaatctgtagggctggacctatgtcctaaggacacactaatcgaactatgaactacaaagcttctatcccagggaggtggctatggcccccgnttnctgctggcctgggatctccccactctaggggtcaggctccattaggatttgccccttcccatctcttcctacccaaccactcaaattaatctttctttaacccgaggaccagttggggagcactgggagttcaggggagggagagggggaaggggncagtttggggttgcccggttt

SEQ ID NO: 383 - DNA, 487 bp, Homo sapiens
ttttttttttttttttttatttttttaaagcattttaataaaattaacaaataaatattctaaactgtataggctacagggacaaagggtagaagctagagggccagtatttcctgctcaggcactcaagtcccctttagagagaccctgctctgggctggtttggggctaagactgctgacttggggaggcggggagtgaacccggaatgggtgatctgggctcttgcagccattcctctttgttggtgtaaaggaggagagaaaagtcaagaaagcaagacactgcaaaaggcatcccagtgaaccccagaagtgaatagggtaagaggagcgctatcctaaaaggaggggatgtaacaaaaggggcaagtaagcaaggcgataagaatagacaatggagagcttcgacgcggttctacatatggacaaacactctcagacgttaaacctgataaacaaaagtcatcacccgtaatagtcaggat

SEQ ID NO: 384 - DNA, 2376 bp, Homo sapiens
gaggaggagtggggaccgggcggggggtggaggaagaggcctcgcgcagaggagggagcaattgaatttcaaacacaaacaactcgacgagcgcgcacccaccgcgccggagccttgccccgatccgcgcccgccccgtccgtgcggcgcgcgggcggagacgccgtggccgcgccggagctcgggccgggggccaccatcgaggcgggggccgcgcgagggccggagcggagcggcgccgccaccgccgcacgcgcaaacttgggctcgcgcttcccggcccggcgcggagcccggggcgcccggagccccgccatgtcgcgatccaaccggcagaaggagtacaaatgcggggacctggtgttcgccaagatgaagggctacccacactggccggcccggattgacgagatgcctgaggctgccgtgaaatcaacagccaacaaataccaagtcttttttttcgggacccacgagacggcattcctgggccccaaagacctcttcccttacgaggaatccaaggagaagtttggcaagcccaacaagaggaaagggttcagcgaggggctgtgggagatcgagaacaaccctactgtcaaggcttccggctatcagtcctcccagaaaaagagctgtgtggaagagcctgaaccagagcccgaagctgcagagggtgacggtgataagaaggggaatgcagagggcagcagcgacgaggaagggaagctggtcattgatgagccagccaaggagaagaacgagaaaggagcgttgaagaggagagcaggggacttgctggaggactctcctaaacgtcccaaggaggcagaaaaccctgaaggagaggagaaggaggcagccaccttggaggttgagaggccccttcctatggaggtggaaaagaatagcaccccctctgagcccggctctggccgggggcctccccaagaggaagaagaagaggaggatgaagaggaagaggctaccaaggaagatgctgaggccccaggcatcagagatcatgagagcctgtagccaccaatgtttcaagaggagcccccaccctgttcctgctgctgtctgggtgctactggggaaactggccatggcctgcaaactgggaacccctttcccaccccaacctgctctcctcttctactcacttttcccactccaagcccagcccatggagattgacctggatggggcaggccacctggctctcacctctaggtccccatactcctatgatctgagtcagagccatgtcttctccctggaatgagttgaggccactgtgttccttccgcttggagctattttccaggcttctgctggggcctgggacaactgctcccacctcctgacacccttctcccactctcctaggcattctggacctctgggttgggatcaggggtaggaatggaaggatggagcatcaacagcagggtgggcttgtggggcctgggaggggcaatcctcaaatgcggggtgggggcagcacaggagggcggcctccttctgagctcctgtcccctgctacacctattatcccagctgcctagattcagggaaagtgggacagcttgtaggggaggggctcctttccataaatccttgatgattgacaacacccatttttccttttgccgaccccaagagttttgggagttgtagttaatcatcaagagaatttggggcttccaagttgttcgggccaaggacctgagacctgaagggttgactttacccatttgggtgggagtgttgagcatctgtccccctttagatctctgaagccacaaataggatgcttgggaagactcctagctgtcctttttcctctccacacagtgctcaaggccagcttatagtcatatatatcacccagacataaaggaaaagacacattttttaggaaatgtttttaataaaagaaaattacaaaaaaaaattttaaagacccctaaccctttgtgtgctctccattctgctccttccccatcgttgcccccatttctgaggtgcactgggaggctccccttctatttggggcttgatgactttctttttgtagctggggctttgatgttccttccagtgtcatttctcatccacataccctgacctggccccctcagtgttgtcaccagatctgatttgtaacccactgagaggacagagagaaataagtgccctctcccaccctcttcctactggtctctctatgcctctctacagtctcgtctcttttaccctggcccctctcccttgggctctgatgaaaaattgctgactgtagctttggaagtttagctctgagaaccgtagatgatttcagttctaggaaaataaaacccgttgattact

SEQ ID NO: 385 - DNA, 479 bp, Homo sapiens
ttagtaatcaacgggttttattttcctagaactgaaatcatctacggttctcagagctaaacttccaaagctacagtcagcaatttttcatcagagcccaagggagaggggccagggtaaaagagacgagactgtagagaggcatagagagaccagtaggaagagggtgggagagggcacttatttctctctgtcctctcagtgggttacaaatcagatctggtgacaacactgagggggccaggtcagggtatgtggatgagaaatgacactggaaggaacatcaaagccccagctacaaaaaaaaagtcatcaagccccaaatagaaggggagcctcccagtgcacctcagaaatgggggcaacgatggggaaggagcagaatggagagcacacaaagggttaggggtctttaaaatttttttttgtaattttcttttattaaaaacatttcctaaaaaatgtgtcttttcctttat

SEQ ID NO: 386 - DNA, 437 bp, Homo sapiens
taataaaagaaaattacaaaaaaaaattttaaagacccctaaccctttgtgtgctctccattctgctccttccccatcgttgcccccatttctgaggtgcactgggaggctccccttctatttggggcttgatgactttttttttgtagctggggctttgatgttccttccagtgtcatttctcatccacataccctgacctggccccctcagtgttgtcaccagatctgatttgtaacccactgagaggacagagagaaataagtgccctctcccaccctcttcctactggtctctctatgcctctctacagtctcgtctcttttaccctggcccctctcccttgggctctgatgaaaaattgctgactgtagctttggaagtttagctctgagaaccgtagatgatttcagttctaggaaaataaaacccgttga

SEQ ID NO: 387 - DNA, 528 bp, Homo sapiens
  misc_feature (1)..(528): "n" represents an unknown nucleotide
tggcaccacccaccagacctccttggagctcttcatgtacctgaacgaagtcgcgggcaagcatggcgtgggccgtattgacatcgtggagaaccgcttcattggaatgaagtcccgaggtatctacgagaccccagcaggcaccatcctttaccatgctcatttagacatcgaggccttcaccatggaccgggaagtgcgcaaaatcaaacaaggcctgggcttgaaatttgctgagctggtgtataccggtttctggcacagccctgagtgtgaatttgtccgccactgcatcgccaagtcccaggagcgagtggaagggaaagtgcaggtgtccgtcctcaagggccaggtgtacatcctcggccgggagtcccactgtctctctacaatgaggagctggtgagcatgaacgtgcagggtgattatgangcaactgatgccaccgggttcatcaacatcaattacctcaggctgaaggaatatcatcgtctccagagcaaggtcactgccaattagcgcctgtac

SEQ ID NO: 388 - DNA, 242 bp, Homo sapiens
tttttcctgtgcacaggtcccatttattgtagaaaataataataattacagtgatgaatagctcttcttaaattacaaaacagaaaccacaaagaaggaagaggaaaaaccccaggacttccaagggtgaagctgtcccctcctccctgccaccctcccaggctcattagtgtccttggaaggggcagaggactcagaggggatcagtctccaggggccctgggctgaagcgggtgaggcag

SEQ ID NO: 389 - DNA, 313 bp, Homo sapiens
ccagcagaggcggctcaggttgcccagctctgtggcctcaggactctctgcctcacccgcttcagcccagggcccctggagactgatcccctctgagtcctctgccccttccaaggacactaatgagcctgggagggtggcagggaggaggggacagcttcacccttggaagtcctggggttttcctcttccttctttgtggtttctgttttgtaatttaagaagagctattcatcactgtaattattattattttctacaataaatgggacctgtgtacaggaaaaagcgaaaaaaaaaaaaaaaaaaaacc

SEQ ID NO: 390 - DNA, 224 bp, Homo sapiens
ttcacattgcttctctttattttcaacagtttctttacaacagtctacacagggattaactcctacatgtacttcccaagccagaatctccctttagaaattcagattctatttctaactctataagatgtatctccccaaagatcacattaactcctcaagtcaacatctgcctatccccaacttcccctttttttcctcactgaacatttgtctgaatgttt

SEQ ID NO: 391 - DNA, 7702 bp, Homo sapiens
cgggagcggcgggagcggtggcggcggcagaggcggcggctccagcttcggctccggctcgggctcgggctccggctccggctccggctccggctccagctcgggtggcggtggcgggagcgggaccaggtggaggcggcggcggcagaggagtgggagcagcggccctagcggcttgcggggggacatgcggaccgacggcccctggataggcggaaggagtggaggccctggtgcccggcccttggtgctgagtatccagcaagagtgaccggggtgaagaagcaaagactcggttgattgtcctgggctgtggctggctgtggagctagagccctggatggcccctgagccagccccagggaggacgatggtgccccttgtgcctgcactggtgatgcttggtttggtggcaggcgcccatggtgacagcaaacctgtcttcattaaagtccctgaggaccagactgggctgtcaggaggggtagcctccttcgtgtgccaagctacaggagaacccaagccgcgcatcacatggatgaagaaggggaagaaagtcagctcccagcgcttcgaggtcattgagtttgatgatggggcagggtcagtgcttcggatccagccattgcgggtgcagcgagatgaagccatctatgagtgtacagctactaacagcctgggtgagatcaacactagtgccaagctctcagtgctcgaagaggaacagctgccccctgggttcccttccatcgacatggggcctcagctgaaggtggtggagaaggcacgcacagccaccatgctatgtgccgcaggcggaaatccagaccctgagatttcttggttcaaggacttccttcctgtagaccctgccacgagcaacggccgcatcaagcagctgcgttcaggtgccttgcagatagagagcagtgaggaatccgaccaaggcaagtacgagtgtgtggcgaccaactcggcaggcacacgttactcagcccctgcgaacctgtatgtgcgagtgcgccgcgtggctcctcgtttctccatccctcccagcagccaggaggtgatgccaggcggcagcgtgaacctgacatgcgtggcagtgggtgcacccatgccctacgtgaagtggatgatgggggccgaggagctcaccaaggaggatgagatgccagttggccgcaacgtcctggagctcagcaatgtcgtacgctctgccaactacacctgtgtggccatctcctcgctgggcatgatcgaggccacagcccaggtcacagtgaaagctcttccaaagcctccgattgatcttgtggtgacagagacaactgccaccagtgtcaccctcacctgggactctgggaactcggagcctgtaacctactatggcatccagtaccgcgcagcgggcacggagggcccctttcaggaggtggatggtgtggccaccacccgctacagcattggcggcctcagccctttctcggaatatgccttccgcgtgctggcggtgaacagcatcgggcgagggccgcccagcgaggcagtgcgggcacgcacgggagaacaggcgccctccagcccaccgcgccgcgtgcaggcacgcatgctgagcgccagcaccatgctggtgcagtgggagcctcccgaggagcccaacggcctggtgcggggataccgcgtctactatactccggactcccgccgccccccgaacgcctggcacaagcacaacaccgacgcggggctcctcacgaccgtgggcagcctgctgcctggcatcacctacagcctgcgcgtgcttgccttcaccgccgtgggcgatggccctcccagccccaccatccaggtcaagacgcagcagggagtgcctgcccagcccgcggacttccaggccgaggtggagtcggacaccaggatccagctctcgtggctgctgccccctcaggagcggatcatcatgtatgaactggtgtactgggcggcagaggacgaagaccaacagcacaaggtcaccttcgacccaacctcctcctacacactagaggacctgaagcctgacacactctaccgcttccagctggctgcacgctcggatatgggggtgggcgtcttcacccccaccattgaggcccgcacagcccagtccaccccctccgcccctccccagaaggtgatgtgtgtgagcatgggctccaccacggtccgggtaagttgggtcccgccgcctgccgacagccgcaacggcgttatcacccagtactccgtggcccacgaggcggtggacggcgaggaccgcgggcggcatgtggtggatggcatcagccgtgagcactccagctgggacctggtgggcctggagaagtggacggagtaccgggtgtgggtgcgggcacacacagacgtgggccccggccccgagagcagcccggtgctggtgcgcaccgatgaggacgtgcccagcgggcctccgcggaaggtggaggtggagccactgaactccactgctgtgcatgtctactggaagctgcctgtccccagcaagcagcatggccagatccgcggctaccaggtcacctacgtgcggctggagaatggcgagccccgtggactccccatcatccaagacgtcatgctagccgaggcccagtggcggccagaggagtccgaggactatgaaaccactatcagcggcctgaccccggagaccacctactccgttactgttgctgcctataccaccaagggggatggtgcccgcagcaagcccaaaattgtcactacaacaggtgcagtcccaggccggcccaccatgatgatcagcaccacggccatgaacactgcgctgctccagtggcacccacccaaggaactgcctggcgagctgctgggctaccggctgcagtactgccgggccgacgaggcgcggcccaacaccatagatttcggcaaggatgaccagcacttcacagtcaccggcctgcacaaggggaccacctacatcttccggcttgctgccaagaaccgggctggcttgggtgaggagttcgagaaggagatcaggacccccgaggacctgcccagcggcttcccccaaaacctgcatgtgacaggactgaccacgtctaccacagaactggcctgggacccgccagtgctggcggagaggaacgggcgcatcatcagctacaccgtggtgttccgagacatcaacagccaacaggagctgcagaacatcacgacagacacccgctttacccttactggcctcaagccagacaccacttacgacatcaaggtccgcgcatggaccagcaaaggctctggcccactcagccccagcatccagtcccggaccatgccggtggagcaagtgtttgccaagaacttccgggtggcggctgcaatgaagacgtctgtgctgctcagctgggaggttcccgactcctataagtcagctgtgccctttaagattctgtacaatgggcagagtgtggaggtggacgggcactcgatgcggaagctgatcgcagacctgcagcccaacacagagtactcgtttgtgctgatgaaccgtggcagcagcgcagggggcctgcagcacctggtgtccatccgcacagcccccgacctcctgcctcacaagccgctgcctgcctctgcctacatagaggacggccgcttcgatctctccatgccccatgtgcaagacccctcgcttgtcaggtggttctacattgttgtggtacccattgaccgtgtgggcgggagcatgctgacgccaaggtggagcacacccgaggaactggagctggacgagcttctagaagccatcgagcaaggcggagaggagcagcggcggcggcggcggcaggcagaacgtctgaagccatatgtggctgctcaactggatgtgctcccggagacctttaccttgggggacaagaagaactaccggggcttctacaaccggcccctgtctccggacttgagctaccagtgctttgtgcttgcctccttgaaggaacccatggaccagaagcgctatgcctccagcccctactcggatgagatcgtggtccaggtgacaccagcccagcagcaggaggagccggagatgctgtgggtgacgggtcccgtgctggcagtcatcctcatcatcctcattgtcatcgccatcctcttgttcaaaaggaaaaggacccactctccgtcctctaaggatgagcagtcgatcggactgaaggactccttgctggcccactcctctgaccctgtggagatgcggaggctcaactaccagaccccaggtatgcgagaccacccacccatccccatcaccgacctggcggacaacatcgagcgcctcaaagccaacgatggcctcaagttctcccaggagtatgagtccatcgaccctggacagcagttcacgtgggagaattcaaacctggaggtgaacaagcccaagaaccgctatgcgaatgtcatcgcctacgaccactctcgagtcatccttacctctatcgatggcgtccccgggagtgactacatcaatgccaactacatcgatggctaccgcaagcagaatgcctacatcgccacgcagggccccctgcccgagaccatgggcgatttctggagaatggtgtgggaacagcgcacggccactgtggtcatgatgacacggctggaggagaagtcccgggtaaaatgtgatcagtactggccagcccgtggcaccgagacctgtggccttattcaggtgaccctgttggacacagtggagctggccacatacactgtgcgcaccttcgcactccacaagagtggctccagtgagaagcgtgagctgcgtcagtttcagttcatggcctggccagaccatggagttcctgagtacccaactcccatcctggccttcctacgacgggtcaaggcctgcaaccccctagacgcagggcccatggtggtgcactgcagcgcgggcgtgggccgcaccggctgcttcatcgtgattgatgccatgttggagcggatgaagcacgagaagacggtggacatctatggccacgtgacctgcatgcgatcacagaggaactacatggtgcagacggaggaccagtacgtgttcatccatgaggcgctgctggaggctgccacgtgcggccacacagaggtgcctgcccgcaacctgtatgcccacatccagaagctgggccaagtgcctccaggggagagtgtgaccgccatggagctcgagttcaagttgctggccagctccaaggcccacacgtcccgcttcatcagcgccaacctgccctgcaacaagttcaagaaccggctggtgaacatcatgccctacgaattgacccgtgtgtgtctgcagcccatccgtggtgtggagggctctgactacatcaatgccagcttcctggatggttatagacagcagaaggcctacatagctacacaggggcctctggcagagagcaccgaggacttctggcgcatgctatgggagcacaattccaccatcatcgtcatgctgaccaagcttcgggagatgggcagggagaaatgccaccagtactggccagcagagcgctctgctcgctaccagtactttgttgttgacccgatggctgagtacaacatgccccagtatatcctgcgtgagttcaaggtcacggatgcccgggatgggcagtcaaggacaatccggcagttccagttcacagactggccagagcagggcgtgcccaagacaggcgagggattcattgacttcatcgggcaggtgcataagaccaaggagcagtttggacaggatgggcctatcacggtgcactgcagtgctggcgtgggccgcaccggggtgttcatcactctgagcatcgtcctggagcgcatgcgctatgagggcgtggtcgacatgtttcagaccgtgaagaccctgcgtacacagcgtcctgccatggtgcagacagaggaccagtatcagctgtgctaccgtgcggccctggagtacctcggcagctttgaccactatgcaacgtaactaccgctcccctctcctccgccacccccgccgtggggctccggaggggacccagctcctctgagccataccgaccatcgtccagccctcctacgcagatgctgtcactggcagagcacagcccacggggatcacagcgtttcaggaacgttgccacaccaatcagagagcctagaacatccctgggcaagtggatggcccagcaggcaggcactgtggcccttctgtccaccagacccacctggagcccgcttcaagctctctgttgcgctcccgcatttctcatgcttcttctcatggggtggggttggggcaaagcctcctttttaatacattaagtggggtagactgagggattttagcctcttccctctgatttttcctttcgcgaatccgtatctgcagaatgggccactgtaggggttggggtttattttgttttgttttttttttttttttgtatgacttctgctgaaggacagaacattgccttcctcgtgcagagctggggctgccagcctgagcggaggctcggccgtgggccgggaggcagtgctgatccggctgctcctccagcccttcagacgagatcctgtttcagctaaatgcagggaaactcaatgtttttttaagttttgttttccctttaaagcctttttttaggccacattgacagtggtgggcggggagaagatagggaacactcatccctggtcgtctatcccagtgtgtgtttaacattcacagcccagaaccacagatgtgtctgggagagcctggcaaggcattcctcatcaccatcgtgtttgcaaaggttaaaacaaaaacaaaaaaccacaaaaataaaaaacaaaaaaaacaaaaaacccaaaaaaaaaaaaaaaaagagtcagcccttggcttctgcttcaaaccctcaagaggggaagcaactccgtgtgcctggggttcccgagggagctgctggctgacctgggcccacagagcctggctttggtccccagcattgcagtatggtgtggtgtttgtaggctgtggggtctggctgtgtggccaaggtgaatagcacaggttagggtgtgtgccacaccccatgcacctcagggccaagcgggggcgtggctggcctttcaggtccaggccagtgggcctggtagcacatgtctgtcctcagagcaggggccagatgattttcctccctggtttgcagctgttttcaaagcccccgataatcgctcttttccactccaagatgccctcataaaccaatgtggcaagactactggacttctatcaatggtactctaatcagtccttattatcccagcttgctgaggggcagggagagcgcctcttcctctgggcagcgctatctagataggtaagtgggggcggggaagggtgcatagctgttttagctgagggacgtggtgccgacgtccccaaacctagctaggctaagtcaagatcaacattccagggttggtaatgttggatgatgaaacattcatttttaccttgtggatgctagtgctgtagagttcactgttgtacacagtctgttttctatttgttaagaaaaactacagcatcattgcataattcttgatggtaataaatttgaataatcagatttct

SEQ ID NO: 392 - DNA, 309 bp, Homo sapiens
tttttttgtaagaaatctgattattcaaatttattaccatcaagaattatgcaatgatgctgtagtttttcttaacaaatagaaaacagactgtgtacaacagtgaactctacagcactagcatccacaaggtaaaaatgaatgtttcatcatccaacattaccaaccctggaatgttgatcttgacttagcctagctaggtttggggacgtcggcaccacgtccctcagctaaaacagctatgcacccttccccgcccccacttacctatctagatagcgctgcccagaggaagaggcgctctccctg

SEQ ID NO: 393 - DNA, 419 bp, Homo sapiens
tcaaaatgtaaacgtggttttatttaatgccttttatccatcacaaagcacccattccttcccagcatccccctcttcctagaaaacaagatgtagcgtaaggcacgtgcactgtccacatgacgtcaagtaggtctttaaaaacaaaaataagcaatagtcttttcaacagcttgaactgccttcctctctaatgttcaaagaatgattgtccccacaaagcacaacttggagaagagagtgcttacattagaactgtgaaccaccctacataccagttcaaaaaaccaaaccaaaccaacgactaagaaacccagccacacaggtacaagagcataattctggagtaatgagactagtccataaattaaaaagaagacaagacaaacccatcccctcctcatcaccaggcacccccc

SEQ ID NO: 394 - DNA, 224 bp, Homo sapiens
cggcggcgtggactggatgaggaagctggccttccgctaccggcgggtgaaggagatgtacaatacctacaagaacaacgttggtgggttgataggcactcccaaaagggagacctggctacagctccgagctgagctggaactctcacagacctctggctgacccactccctgaaggcactaaacctcatcaactcccggcccaactgtgtcaatgtgctggt

SEQ ID NO: 395 - DNA, 7011 bp, Homo sapiens
cgggccgcatcagccctcctcctgtttgcgctccccagcgtgcaatttatttggggggctaccggggattgaacggagcgggcgagcgctgccaggaggtggggccggccccacctgtcgactgcccgtagtaggcagggagagggcggggtttgtcccatagggcccgccccccagtccctgggtcccgggcgcgcgacgagatataaggcagtcaggaaacaatgcgcctgcagctcgcgctcccgcgccgatcccgagagcgtccgggccgccgtgcgcgagcgagggagggcgcgcgcgcggggggggcgcgctcgtgagtgcgggccgcgctctcggcggcgcgcatgtgcgtgtgtgctggctgccgggctgccccgagccggcggggagccggtccgctccaggtggcgggcggctggagcgaggtgaggctgcgggtggccagggcacgggcgcgggtcccgcggtgcgggctggctgcaggctgccttctgggcacggcgcgcccccgcccggccccgccgggccctgggagctgcgctccgggcggcgctggcaaagtttgctttgaactcgctgcccacagtcgggtccgcgcgctgcgattggcttcccctaccactctgacccggggcccggcttcccgggacgcgaggactgggcgcaggctgcaagctggtggggttggggaggaacgagagcccggcagccgactgtgccgagggacccggggacacctccttcgcccggccggcacccggtcagcacgtccccccttccctcccgcagggagcggacatggactacgactcgtaccagcactatttctacgactatgactgcggggaggatttctaccgctccacggcgcccagcgaggacatctggaagaaattcgagctggtgccatcgccccccacgtcgccgccctggggcttgggtcccggcgcaggggacccggcccccgggattggtcccccggagccgtggcccggagggtgcaccggagacgaagcggaatcccggggccactcgaaaggctggggcaggaactacgcctccatcatacgccgtgactgcatgtggagcggcttctcggcccgggaacggctggagagagctgtgagcgaccggctcgctcctggcgcgccccgggggaacccgcccaaggcgtccgccgccccggactgcactcccagcctcgaagccggcaacccggcgcccgccgccccctgtccgctgggcgaacccaagacccaggcctgctccgggtccgagagcccaagcgactcgggtaaggacctccccgagccatccaagagggggccaccccatgggtggccaaagctctgcccctgcctgaggtcaggcattggctcttctcaagctcttgggccatctccgcctctctttggctgaagctgcccgtgtagtccccaaccgtgtctgtctggcacgtgggtgtgttggtaaacagtttggaaaagtggcgtgggagccagcctccctttgatgattattggagccccaggggacaagggatttgaggtgagggttggcgcttagagaggacaatactggggttggactgtaagggattgaagggggtaccttaagagacactccaaacctgaagtttttttgctgctgcctctttccctaggaaactcacactcccctagggggagaagaagccgagagccttttgtgcaaagccaaaaccttcgtccttttaaaaacctaggtctccagttggctttactttaaaatgccaataataaatgccctcttctcgtgcctccccaccaccacttaccactcgtgcatccctgagacagggagggaagaatgaacactccccattaacagatggaaaaactgaggcttagagatagacaatcactacaagtcagctccagctttctgccatctagccagcccctcttccccaatgctccatcccaaccaggcacctcttccttgatgtttggggtctttgtggtagcttatcttagaagcactacaccttgccttgctgtttgtcctgagatggaaaagtgtccttcttgctccccctcaatagatctccagcgtcagctgctccctggcattcaacaaatattcactggcccctactttgtggcaatctgtgggctacatgctggggtcaaggcagtagaactccaggccctcctctcccatccttgatgcaagtgcaacctcgctgagggcagactggggcatcctgtgccactaaactacattgttcttattctggcatcttagacctccacacccgtgagaaatcctggagagggtatttttgtagagtgtagactgtggctagtgacaaataaattaggaccaagaaagctcactgtagcttttaggaataacttttacacgaccatttgatagggaactggggaatggggtatggaagttttcctacacttgagagaaaaaataggataacaaaaattaaaagtctttttttcctggtccactgtgttaaggtcatttttaaccagcttgctttctacaccaagagtttatgtttgtttaatggctggaaagagaatcttgagatcaaaaaaccaataaagatgtatctctacaacggctggtggagtggtagagtggaaagagcattgctttggaagttggaacattttagtttgagatccagaacgttacaaaggtgatatgtggacttcgctgatctgggcctcagtttccccatttgcacacgatggggttggacttgattgtcctgctgatgacatttccttgtctggatagagtaagacactactctctgaaagggagaatggtgtgcttaaattatttctttcttagatagaatcttcctgagccacgaggcttaacactgaaaattaaaggtttgggatgtaggaaagcctgctgaatcattttctaacctaccctttaacctgaacctgtttgtgagcttctagttcactcacaggccacatggcctggaacaaaatgcaacagattgcaaacaatgaggcggggggtggggaaagtgattggcagcagagctcacccaataggggctaggggctgggtaagacagaattccaaacacagcgtaatcagccaatcatgggctttggggccaggagggctgaatggtcaggtttattaatggagaaataatgcgattgtccacacaatggaagccttcctgacaaaggggctcaagcttcctgatatgcaaagaagctgagaacggagctcttcctttgccgaggccgagatccattaaggtcggacttctgtgtggaggctgcaaaatgtgtggagcaggaggagacttttctcccaattgcccctctcctggttaggttaacctaagagaccttcaagccagtgaatgagaagggcgtgtccaggtgtctccaggtctctggtgttatgagccccatatctgggacattctgctgcccagtctctgcctctggtgcaggtagtttggaaatggtcgcttgtacctttgtgaagttcctgcagcttcgccgacctatgattacaaatctaaccttctagtccagggaaggaggtggggcaggcgacctataaatgatggatgactttagaaacccattgaacccaggagcaaaatgctcctaagggaaaccctttccctcccctctgtgggtgaagagggatgggttgtagccctcccttctctgaatcttcagctgaaagggatggcagaatagagaggtgggggaataataggatttataacttgtgaaaagtaacaattccccaagtgcaggctgtgctgggcaggaacaaagggcagctctgcccacagacccctcatttacaattctgatggggcatgaaagagcccgactggggaagatctttatagctaaactttgtcccaggccggtagctctttctctccaacccctccgtgggggaggggagagcctttgcagactgggggctgttggcttgggtctgccttttgttcttatctaagccttgctgtgcaaaaggaaattggagaatattttccttcttgctaatgtcccctcctttccttcactgtgcccttaccacattacaaatgaatcagctttctgctcacctcgatttgtatatatctaaattggaaaaatgtctcctaccttcccaagcaccagcgtagacagctaaagctgtagggtctatgtttgtgtttctcatgggatgtgtttcttctcttgatctcttttctcggacagagaatgaagaaattgatgttgtgacagtagagaagaggcagtctctgggtattcggaagccggtcaccatcacggtgcgagcagaccccctggatccctgcatgaagcatttccacatctccatccatcagcaacagcacaactatgctgcccgttttcctccagaaagctgctcccaagaagaggcttcagagaggggtccccaagaagaggttctggagagagatgctgcaggggaaaaggaagatgaggaggatgaagagattgtgagtcccccacctgtagaaagtgaggctgcccagtcctgccaccccaaacctgtcagttctgatactgaggatgtgaccaagaggaagaatcacaacttcctggagcgcaagaggcggaatgacctgcgttcgcgattcttggcgctgagggaccaggtgcccaccctggccagctgctccaaggcccccaaagtagtgatcctaagcaaggccttggaatacttgcaagccctggtgggggctgagaagaggatggctacagagaaaagacagctccgatgccggcagcagcagttgcagaaaagaattgcatacctcagtggctactaactgaccaaaaagcctgacagttctgtcttacgaagacacaagtttattttttaacctccctctcccctttagtaatttgcacattttggttatggtgggacagtctggacagtagatcccagaatgcattgcagccggtgcacacacaataaaggcttgcattcttggaaaccttgaaacccagctctccctcttccctgactcatgggagtgctgtatgttctctggcgcctttggcttcccagcaggcagctgactgaggagccttggggtctgcctagctcactagctctgaagaaaaggctgacagatgctatgcaacaggtggtggatgttgtcaggggctccagcctgcatgaaatctcacactctgcatgagctttaggctaggaaaggatgctcccaactggtgtctctggggtgatgcaaggacagctgggcctggatgctctccctgaggctcctttttccagaagacacacgagctgtcttgggtgaagacaagcttgcagacttgatcaacattgaccattacctcactgtcagacactttacagtagccaaggagttggaaacctttatgtattatgatgttagctgacccccttcctcccactcccaatgctgcgaccctgggaacacttaaaaagcttggcctctagattctttgtctcagagccctctgggctctctcctctgagggagggacctttctttcctcacaagggacttttttgttccattatgccttgttatgcaatgggctctacagcaccctttcccacaggtcagaaatatttccccaagacacagggaaatcggtcctagcctggggcctggggatagcttggagtcctggcccatgaacttgatccctgcccaggtgttttccgaggggcacttgaggcccagtcttttctcaaggcaggtgtaagacactcagagggagaactgtactgctgcctctttcccaccttcctcatctcaatccttgagcggcaagtttgaagttcttctggaaccatgcaaatctgtcctcctcatgcaattccaaggagcttgctggctctgcagccacctctgggccccttccagcctgccatgaatcagatatctttcccagaatctgggcgtttctgaagttttggggagagctgttgggactcatccagtgctccagaaggtggacttgcttctggggggttttaaaggagcctccaggagatatgcttagccaaccatgatggattttaccccagctggactcggcagctccaagtggaatccacgtgcagcttctagtctgggaaagtcacccaacctagcagttgtcatgtgggtaacctcaggcacctctaagcctgtcctggaagaaggaccagcagcccctccagaactctgcccaggacagcaggtgcctgctggctctgggtttggaagtttggggtgggtagggggtggtaagtactatatatggctctggaaaaccagctgctacttccaaatctattgtccataatggtttctttctgaggttgcttcttggcctcagaggaccccaggggatgtttggaaatagcctctctacccttctggagcatggtttacaaaagccagctgacttctggaattgtctatggaggacagtttgggtgtaggttactgatgtctcaactgaatagcttgtgttttataagctgctgttggctattatgctgggggagtcttttttttttatattgtatttttgtatgccttttgcaaagtggtgttaactgtttttgtacaaggaaaaaaactcttggggcaatttcctgttgcaagggtctgatttattttgaaaggcaagttcacctgaaattttgtatttagttgtgattactgattgcctgattttaaaatgttgccttctgggacatcttctaataaaagatttctcaaacatgtcagagtgggggcagcttatgccacctgagtcctcctcaaccacggaaaactatttcagggtagccacaagtgatccagagggctgcacttctctaaccatgttgctaacctggtcattccactctgggttcctgaaatgccatttcagacatgttgaaacaatgtaggctcagtactcagtgaacacggaattc

SEQ ID NO: 396 - DNA, 255 bp, Homo sapiens
  misc_feature (1)..(255): "n" represents an unknown nucleotide
gagaaanattttattagaagatgtcccagaaggcaacattttaaaatcaggcaatcagtaatcacaactaaatacaaaatttcaggtgaacttgcctttcaaaataaatcagacccttgcaacaggaaattgccccaagagtttttttccttgtacaaaaacagttaacaccactttgcaaaaggcatacaaaantacantataaaaaaaaangactcccccagcatattagccaacagcagcttntaaaacaca

SEQ ID NO: 397 - DNA, 399 bp, Homo sapiens
  misc_feature (1)..(399): "n" represents an unknown nucleotide
ctttgtctcagagccctctggctncttcctctgagggagggacctttctttcctcacaagggacttttttgttccattatgccttgttatgcaatgggctctacagcaccctttcccacaggtcagaaatatttccccaagacacagggaaatcggtcctagcctggggcctggggatagcttggagtcctgggcccatgaacttgatccctgcccaggtgttttccgaggggcacttgaggcccagtcttttctcaaggcaggtgtaagacacctcagagggagaactgtantgctgcctctttcccacctgccttcatctcaatccttgagcggcaagtttgaagttctttntggaaccatggcaaatctgttcctcctcatgcaatttccaaggga

SEQ ID NO: 398 - DNA, 4003 bp, Homo sapiens
attaaacctctcgccgagcccctccgcagactctgcgccggaaagtttcatttgctgtatgccatcctcgagagctgtctaggttaacgttcgcactctgtgtatataacctcgacagtcttggcacctaacgtgctgtgcgtagctgctcctttggttgaatccccaggcccttgttggggcacaaggtggcaggatgtctcagtggtacgaacttcagcagcttgactcaaaattcctggagcaggttcaccagctttatgatgacagttttcccatggaaatcagacagtacctggcacagtggttagaaaagcaagactgggagcacgctgccaatgatgtttcatttgccaccatccgttttcatgacctcctgtcacagctggatgatcaatatagtcgcttttctttggagaataacttcttgctacagcataacataaggaaaagcaagcgtaatcttcaggataattttcaggaagacccaatccagatgtctatgatcatttacagctgtctgaaggaagaaaggaaaattctggaaaacgcccagagatttaatcaggctcagtcggggaatattcagagcacagtgatgttagacaaacagaaagagcttgacagtaaagtcagaaatgtgaaggacaaggttatgtgtatagagcatgaaatcaagagcctggaagatttacaagatgaatatgacttcaaatgcaaaaccttgcagaacagagaacacgagaccaatggtgtggcaaagagtgatcagaaacaagaacagctgttactcaagaagatgtatttaatgcttgacaataagagaaaggaagtagttcacaaaataatagagttgctgaatgtcactgaacttacccagaatgccctgattaatgatgaactagtggagtggaagcggagacagcagagcgcctgtattggggggccgcccaatgcttgcttggatcagctgcagaactggttcactatagttgcggagagtctgcagcaagttcggcagcagcttaaaaagttggaggaattggaacagaaatacacctacgaacatgaccctatcacaaaaaacaaacaagtgttatgggaccgcaccttcagtcttttccagcagctcattcagagctcgtttgtggtggaaagacagccctgcatgccaacgcaccctcagaggccgctggtcttgaagacaggggtccagttcactgtgaagttgagactgttggtgaaattgcaagagctgaattataatttgaaagtcaaagtcttatttgataaagatgtgaatgagagaaatacagtaaaaggatttaggaagttcaacattttgggcacgcacacaaaagtgatgaacatggaggagtccaccaatggcagtctggcggctgaatttcggcacctgcaattgaaagaacagaaaaatgctggcaccagaacgaatgagggtcctctcatcgttactgaagagcttcactcccttagttttgaaacccaattgtgccagcctggtttggtaattgacctcgagacgacctctctgcccgttgtggtgatctccaacgtcagccagctcccgagcggttgggcctccatcctttggtacaacatgctggtggcggaacccaggaatctgtccttcttcctgactccaccatgtgcacgatgggctcagctttcagaagtgctgagttggcagttttcttctgtcaccaaaagaggtctcaatgtggaccagctgaacatgttgggagagaagcttcttggtcctaacgccagccccgatggtctcattccgtggacgaggttttgtaaggaaaatataaatgataaaaattttcccttctggctttggattgaaagcatcctagaactcattaaaaaacacctgctccctctctggaatgatgggtgcatcatgggcttcatcagcaaggagcgagagcgtgccctgttgaaggaccagcagccggggaccttcctgctgcggttcagtgagagctcccgggaaggggccatcacattcacatgggtggagcggtcccagaacggaggcgaacctgacttccatgcggttgaaccctacacgaagaaagaactttctgctgttactttccctgacatcattcgcaattacaaagtcatggctgctgagaatattcctgagaatcccctgaagtatctgtatccaaatattgacaaagaccatgcctttggaaagtattactccaggccaaaggaagcaccagagccaatggaacttgatggccctaaaggaactggatatatcaagactgagttgatttctgtgtctgaagttcacccttctagacttcagaccacagacaacctgctccccatgtctcctgaggagtttgacgaggtgtctcggatagtgggctctgtagaattcgacagtatgatgaacacagtatagagcatgaatttttttcatcttctctggcgacagttttccttctcatctgtgattccctcctgctactctgttccttcacatcctgtgtttctagggaaatgaaagaaaggccagcaaattcgctgcaacctgttgatagcaagtgaatttttctctaactcagaaacatcagttactctgaagggcatcatgcatcttactgaaggtaaaattgaaaggcattctctgaagagtgggtttcacaagtgaaaaacatccagatacacccaaagtatcaggacgagaatgagggtcctttgggaaaggagaagttaagcaacatctagcaaatgttatgcataaagtcagtgcccaactgttataggttgttggataaatcagtggttatttagggaactgcttgacgtaggaacggtaaatttctgtgggagaattcttacatgttttctttgctttaagtgtaactggcagttttccattggtttacctgtgaaatagttcaaagccaagtttatatacaattatatcagtcctctttcaaaggtagccatcatggatctggtagggggaaaatgtgtattttattacatctttcacattggctatttaaagacaaagacaaattctgtttcttgagaagagaatattagctttactgtttgttatggcttaatgacactagctaatatcaatagaaggatgtacatttccaaattcacaagttgtgtttgatatccaaagctgaatacattctgctttcatcttggtcacatacaattatttttacagttctcccaagggagttaggctattcacaaccactcattcaaaagttgaaattaaccatagatgtagataaactcagaaatttaattcatgtttcttaaatgggctactttgtcctttttgttattagggtggtatttagtctattagccacaaaattgggaaaggagtagaaaaagcagtaactgacaacttgaataatacaccagagataatatgagaatcagatcatttcaaaactcatttcctatgtaactgcattgagaactgcatatgtttcgctgatatatgtgtttttcacatttgcgaatggttccattctctctcctgtactttttccagacacttttttgagtggatgatgtttcgtgaagtatactgtatttttacctttttccttccttatcactgacacaaaaagtagattaagagatgggtttgacaaggttcttcccttttacatactgctgtctatgtggctgtatcttgtttttccactactgctaccacaactatattatcatgcaaatgctgtattcttctttggtggagataaagatttcttgagttttgttttaaaattaaagctaaagtatctgtattgcattaaatataatatcgacacagtgctttccgtggcactgcatacaatctgaggcctcctctctcagtttttatatagatggcgagaacctaagtttcagttgattttacaattgaaatgactaaaaaacaaagaagacaacattaaaaacaatattgtttcta

SEQ ID NO: 399 - DNA, 475 bp, Homo sapiens
gatactttagctttaattttaaaacaaaactcaagaaatctttatctccaccaaagaagaatacagcatttgcatgataatatagttgtggtagcagtagtggaaaaacaagatacagccacatagacagcagtatgtaaaagggaagaaccttgtcaaacccatctcttaatctactttttgtgtcagtgataaggaaggaaaaaggtaaaaatacagtatacttcacgaaacatcatccactcaaaaaagtgtctggaaaaagtacaggagagagaatggaaccattcgcaaatgtgaaaaacacatatatcagcgaaacatatgcagttctcaatgcagttacataggaaatgagttttgaaatgatctgattctcatattatctctggtgtattattcaagttgtcagttactgctttttctactcctttcccaattttgtggctaatagactaaataccaccctaataac

SEQ ID NO: 400 - DNA, 426 bp, Homo sapiens
caactgttataggttgttggataaatcagtggttatttagggaactgcttgacgtaggaacggtaaatttctgtgggagaattcttacatgttttctttgctttaagtgtaactggcagttttccattggtttacctgtgaaatagttcaaagccaagtttatatacaattatatcagtcctctttcaaaggtagccatcatggatctggtagggggaaaatgtgtattttattacatctttcacattggctatttaaagacaaagacaaattctgtttcttgagaagagaatattagctttactgtttgttatggcttaatgacactagctaatatcaatagaaggatgtacatttccaaattcacaagttgtgtttgatatccaaagctgaatacattctgctttcatcttggtcacatacaat

SEQ ID NO: 401 - DNA, 365 bp, Homo sapiens
  misc_feature (1)..(365): "n" represents an unknown nucleotide
tttttaattttcccaagattaaatgattattaaaaaagcgcgccacactgtatagaaatcaacattctctcccataattctgtgcatctgggactacagaaatgtcactgtccctgccccacatcttcaaattaacattttcaggtcacaacaataagtcttcccaaagggaccttccggaaaaataagctatttcctcggctcatattcccctctttttgtagcatgcaccaacagtctatccaagacgtatatattggggagtaaggagggcatccaccagcaaagaccacagttgttgacagccataagatttgggagacaagcacaaaggggataggtcnaacatactcgcaaaaaaacct

SEQ ID NO: 402 - DNA, 309 bp, Homo sapiens
tctccaatcttatggctgtcaacaactgtggtcttgctggtggatgccctccttactccccaatatatacgtcttggatagactgttggtgcatgctacaaaaagaggggaatatgagccgaggaaatagcttatttttccggaaggtcccctttgggaagacttattgttgtgacctgaaaatgttaatttgaagatgtggggcagggacagtgacatttctgtagtcccagatgcacagaattatgggagagaatgttgatttctatacagtgtggcccgcttttttaataatcatttaatcttggg

SEQ ID NO: 403 - DNA, 441 bp, Homo sapiens
agggtttcactgcattttattcttcccactcccatcatctgatgggggatgagtgttcagggaagctgccacaagtgaggtgaagaaaaaaaagacactaggggttagagaagcctcgtacagagttatcaggcctgtgtagtagagagttggttttgccttcaacctaaaagcaaagttgtgaaagaaaagcagaattccaaagtcccttattcaggtgagggtcaatggggaaaagtccacaactagagtggacttagggagtgcccgagtttctcctgatctaagagagcatgttttaaagccatggtgagctgctgggggtgggacaagggtgtaagggccttgaacacccagtttttggtggaagggttcagaccttggcttgtgattgctgagatgaattggcattggaaacagggcacgggactttgtctgtgt

SEQ ID NO: 404 - DNA, 505 bp, Homo sapiens
  misc_feature (1)..(505): "n" represents an unknown nucleotide
gtctcaaaaacaggtattatctttattaaaaaatggatagatatagcagcacttacaaaacaggttcatcaaaggcattgtacactgtcaactgataatgtggagagggcagccccctgcccagctggctatgggctctgcacaacgcttgcccgcaaccacctgctccacttggtacaacggagcccagaacacctgcgaggagagccacgccaccgtcgcnctccacagcttcaagcttttgttgttgtggggagtcccttagggtcaagtagcaccttccatagcagcatcgggagcacgcactgggtgtctgggaggtggctgggtgtactttgacccactttattttaaaaaaaacctattaggcatttcaattaaaaaacactttttgccctgttttggatggccattccacaggaaatactttctgtttgtngggaaggaaacactttttccctttcaggatatcttgttaaaaggcaaacggacggcttccgttcgt

SEQ ID NO: 405 - DNA, 398 bp, Homo sapiens
  misc_feature (1)..(398): "n" represents an unknown nucleotide
gngagggtgcgntttgcttttacagatatctgaatggaagagtgtttcttccacaacagaagtatttctgtggatggcatcaaacagggcaaagtgttttttattgaatgcttataggttttttttaaataagtgggtcaagtacaccagccacctccagacaccagtgcgtgctcccgatgctgctatggaaggtgctacttgacctaagggactcccacaacaacaaaagcttgaagctgtgggagggccacggtggcgtcgttcttccttcgcaggtgtttctggggctccgtttgttacccaagtgggagcaggtggtttgcggggcaagcgtttntgccaggaccccntagcccagctgggcaggggggctgcctntttccacattattcaat

SEQ ID NO: 406 - DNA, 396 bp, Homo sapiens
aaaatcaactatcattttaattacaatcttaaacacttttgtttaagggaatccaattttcctcttccaagggtcttccaaacatggaatatgtaggttttcatcataatctcaatgttgtttatccaaatgtatcacgttatataaatatgtagaggtttccagatgtcaagggcagggtattaggttcaagtgtggctggctctaacctctccactgaactcctagagtgagatttaagttttatttaatctaactttactaattcaacttagtcgtgtaagaaggatatgaagaatatgaattattgtacttcacactgctactttcatgtacagtatagtagaataatactgacaactatagacaagaagttaaaatttgtctcaggaaaat

SEQ ID NO: 407 - DNA, 1578 bp, Homo sapiens
gcgcccttaaagatggtgagggggctcatgctctgagtagaaggtggtgacctccaggagcggtgggatgatgagggcccgggcgcctcttgcaatggagacggtcatttcttcagatagctccccagctgtggaaaatgagcatcctcaagagaccccagaatccaacaatagcgtgtatacttccttcatgaagtctcatcgctgctatgacctgattcccacaagctccaaattggttgtatttgatacgtccctgcaggtgaagaaagctttttttgctttggtgactaacggtgtacgagctgcccctttatgggatagtaagaagcaaagttttgtgggcatgctgaccatcactgatttcatcaatatcctgcaccgctactataaatcagccttggtacagatctatgagctagaagaacacaagatagaaacttggagagaggtgtatctccaggactcctttaaaccgcttgtctgcatttctcctaatgccagcttgtttgatgctgtctcttcattaattcggaacaagatccacaggctgccagttattgacccagaatcaggcaatactttgtacatcctcacccacaagcgcattctgaagttcctcaaattgtttatcactgagttccccaagccagagttcatgtccaagtctctggaagagctacagattggcacctatgccaatattgctatggttcgcactaccacccccgtctatgtggctctggggatttttgtacagcatcgagtctcagccctgccagtggtggatgagaaggggcgtgtggtggacatctactccaagtttgatgttatcaatctggcagcagaaaagacctacaacaacctagatgtatctgtgactaaagccttgcaacatcgatcacattactttgagggtgttctcaagtgctacctgcatgagactctggagaccatcatcaacaggctagtggaagcagaggttcaccgacttgtagtggtggatgaaaatgatgtggtcaagggaattgtatcactgtctgacatcctgcaggccctggtgctcacaggtggagagaagaagccctgagctgggggaaggggtcatgcagcaccaggggatatgcccaactcactgcctgctggaagctctgtgggaatcagatgaaacttgagggaattgtgactctgttccctgttcagggtcccctgcccttctatctgggagctagggaaggtatgggggaggaaagagaatggatttatagctacccttaccctcacacatacacttgaaaaaactttcagcctagccagttctagcccctgtcctcttagatatatccccctttctgggtgaactataggctctgtgcctctcagacaaattctgatctctaagagatccccagacctcacttgcctctgcctccatcttggccctgattcaaccctaagataatagcacaacaaaattcttcataaagatatttttattcacctgttccgtgctatatggaggaggccaagtccatttagtgacatttcttcccataatgtgagtggggaggattgtgg

SEQ ID NO: 408 - DNA, 467 bp, Homo sapiens
  misc_feature (1)..(467): "n" represents an unknown nucleotide
tcgtgaagagattcctgtcatttaattagatttgccacaaaaagcaataaccttagctaaccacgctgctctcctcctccacctaacccccatctcccttcatatgcacaaacacaggaacccaaagcccctcctccccacaatcctccccactcacattatgggaagaaatgtcactaaatggacttggcctcctccatatagcacggaacaggtgaataaaaatatctttatgaagaattttgttgtgctattatcttaagggttgaatcagggccaagatggaggcagaggcaagtgaggtctggggatctcttagagatcagaatttgtctgagaggcacagagcctatagttcaccccagaaaggggggatatatctaagaggacaggggctagaactggctagggctgaaagttttttcaagtgtatgtgtgagggtaagggtngctattaaatccattct

SEQ ID NO: 409 - DNA, 344 bp, Homo sapiens
  misc_feature (1)..(344): "n" represents an unknown nucleotide
atacgtccctgcaggtgaagaaagctncnnnncgctnnngtgactaacggtgtacgagctgcccctnctatgggatantaagaagcaaagttttgtgggcatgctgaccatcactgatttcatcaatatcctgcaccgctactataaatcatgccttggtacagatctatgagctagaagaacacaagatagaaacttgggagagaggtgtatctccaggactcctttaaaccgcttggtctgcattttctcctaatgcnagcttggtnccatgctgtctcttcattaattcggaacaagatncacaggctgccagttattgacccagaatcaggcaatanttt

SEQ ID NO: 410 - DNA, 297 bp, Homo sapiens
ttatacttcaaaagcaattttcctttattaaaagaatgcttataaaaagttcatttcacttctgcgtcatttcttctggtcactcccagctcacttgcagcacttggccttccctctgtaacaggtgccttgaattttggtaaagatcgggcaggcagaatagagacattgccctccactgctgacccaattgtaatgatcagatctgtggccaaggcctgtgagaaagttaccacctgaggccatctcagacaaaagtaagcagagagtaaacagcagaaggtaggaagttctcat

SEQ ID NO: 411 - DNA, 634 bp, Homo sapiens
  misc_feature (1)..(634): "n" represents an unknown nucleotide
gcctgggtaagccacgacagcaccgtctgcctggctgatgccgacaagaagatggccgtcgcgactctggcctctgaaacactaccactgctggcgctgaccttcatcacagacaacagcctggtggcagcgggccacgactgcttcccggtgctgttcacctatgacgccgccgcggggatgctgagcttcggcggagcggctggacgttcctaagcagagctcgcagcgtggcttgacggcccgcgagcgcttccagaacctggacaagaaggcgagctccgagggtggcacggctgcgggcgcgggcctagactcgctgcacaagaacagcgtcancangatctcggtgctcagcggcggcaaggccaagtgctcgcagttctgcaccactggcatggatggcggcatgagtatctgggatgtgaagagcttggagtcagccttgaaggacctcaagatcaaatgacctgtgangaatatgttgccttcatcctagctgctggggaagcggggagaggggtcagggaggctaatggttgctttgctgaatgtttctggggtaccaatacgagttccccataggggctgctccctcaaaaagggaagggacagatggggagcttttctacta

SEQ ID NO: 412 - DNA, 588 bp, Homo sapiens
  misc_feature (1)..(588): "n" represents an unknown nucleotide
tttttacacagttgcattttattacctccacattttgaagcagttcatgaccagcatagtgctttgggggcatttttttttttttttcaataaatgaaagcatttaagaaaaaggcacgtattccttgaataggtaagaaaagctccccatctgtcccctccctttttgagggagcancccctatggaactcgtattggtaccccagaaacattcagcaaagcaaccattagcctccctgacccctctccccgcttccccagcagctaggatgaaggcaacatattcctcanaggtcatttgatcttgaggtccttcaaggctgactccaagctcttcanatcccngatactcatgccgccatccatgccagtggtgcagaactgcgagcacttggccttgcgccgctgagcaccgagatctggctgacgctgttcttgtgcagcgantctaggnccgcgcccgcagccgtgccaccctcggagntcgccttcttgtccaagttctggaagcnctcgggggccgtaaagncacgctgcgagtctgcttangaagttcaacgnccgcgaagtcaacatcccgnggggta

SEQ ID NO: 413 - DNA, 2261 bp, Homo sapiens
ccgcggttccggctgctccggcgaggcgacccttgggtcggcgctgcgggcgaggtgggcaggtaggtgggcggacggccgcggttctccggcaagcgcaggcggcggagtcccccacggcgcccgaagcgccccccgcacccccggcctccagcgttgaggcgggggagtgaggagatgccgacccagagggacagcagcaccatgtcccacacggtcgcaggcggcggcagcggggaccattcccaccaggtccgggtgaaagcctactaccgcggggatatcatgataacacattttgaaccttccatctcctttgagggcctttgcaatgaggttcgagacatgtgttcttttgacaacgaacagctcttcaccatgaaatggatagatgaggaaggagacccgtgtacagtatcatctcagttggagttagaagaagcctttagactttatgagctaaacaaggattctgaactcttgattcatgtgttcccttgtgtaccagaacgtcctgggatgccttgtccaggagaagataaatccatctaccgtagaggtgcacgccgctggagaaagctttattgtgccaatggccacactttccaagccaagcgtttcaacaggcgtgctcactgtgccatctgcacagaccgaatatggggacttggacgccaaggatataagtgcatcaactgcaaactcttggttcataagaagtgccataaactcgtcacaattgaatgtgggcggcattctttgccacaggaaccagtgatgcccatggatcagtcatccatgcattctgaccatgcacagacagtaattccatataatccttcaagtcatgagagtttggatcaagttggtgaagaaaaagaggcaatgaacaccagggaaagtggcaaagcttcatccagtctaggtcttcaggattttgatttgctccgggtaataggaagaggaagttatgccaaagtactgttggttcgattaaaaaaaacagatcgtatttatgcaatgaaagttgtgaaaaaagagcttgttaatgatgatgaggatattgattgggtacagacagagaagcatgtgtttgagcaggcatccaatcatcctttccttgttgggctgcattcttgctttcagacagaaagcagattgttctttgttatagagtatgtaaatggaggagacctaatgtttcatatgcagcgacaaagaaaacttcctgaagaacatgccagattttactctgcagaaatcagtctagcattaaattatcttcatgagcgagggataatttatagagatttgaaactggacaatgtattactggactctgaaggccacattaaactcactgactacggcatgtgtaaggaaggattacggccaggagatacaaccagcactttctgtggtactcctaattacattgctcctgaaattttaagaggagaagattatggtttcagtgttgactggtgggctcttggagtgctcatgtttgagatgatggcaggaaggtctccatttgatattgttgggagctccgataaccctgaccagaacacagaggattatctcttccaagttattttggaaaaacaaattcgcataccacgttctctgtctgtaaaagctgcaagtgttctgaagagttttcttaataaggaccctaaggaacgattgggttgtcatcctcaaacaggatttgctgatattcagggacacccgttcttccgaaatgttgattgggatatgatggagcaaaaacaggtggtacctccctttaaaccaaatatttctggggaatttggtttggacaactttgattctcagtttactaatgaacctgtccagctcactccagatgacgatgacattgtgaggaagattgatcagtctgaatttgaaggttttgagtatatcaatcctcttttgatgtctgcagaagaatgtgtctgatcctcatttttcaaccatgtattctactcatgttgccatttaatgcatggataaacttgctgcaagcctggatacaattaaccattttatatttgccacctacaaaaaaacacccaatatcttctcttgtagactatatgaatcaattattacatctgttttactatgaaaaaaaaattaatactactagcttccagacaatcatgtcaaaatttagttgaactggtttttcagtttttaaaaggcctacagatgagtaatgaagttaccttttttgtttaaaaaaaaaaaag

SEQ ID NO: 414 - DNA, 530 bp, Homo sapiens
  misc_feature (1)..(530): "n" represents an unknown nucleotide
acaaaanatttaacttcattactcatctgtaggccttttaaaaactgaaaaaccagttcaactaaattttgacatgattgtctggaagctagtagtattaatttttttttcatagtaaaacagatgtaataattgattcatatagtctacaagagaagatattgggtgtttttttgtaggtggcaaatataaaatggttaattgtatccaggcttgcagcaagtttatccatgcattaaatggcaacatgagtagaatacatggttgaaaaatgaggatcagacacattcttctgcagacatcaaaagaggattgatatactcaaaaccttcaaattcagactgatcaatcttcctcacaatgtcatcgtcatctgggagtgagctgggacaggttcattaggtaaactgaggantcaaagttgtcccaaaccaaattccccnggaaatatttggggttaaaggggaggggnccccctgttttttgctccctcctatccccntcaacctttcgggaggaccgggtgtccc

SEQ ID NO: 415 - DNA, 342 bp, Homo sapiens
  misc_feature (1)..(342): "n" represents an unknown nucleotide
ataggtacaactaggtgttagaaatataatgtactacgcaaagcatttcccattataactctgatacaaatgttctcaacaggcaatgaacaccagggaaagtggcaaagcttcatccagtctaggtcttcaggattttgatttgctccgggtaataggaagaggaagttatgccaaagtactgttggttcgattaaaaaaaacagatcgtatttatgcaatgaaagttgtgaaaaaagagcttgttaattgatgatgagggtatttgattggggtacagacagaggaagcatgtgttttgagccaggcatcccattcatcctttccnttgtttggggctgc

SEQ ID NO: 416 - DNA, 474 bp, Homo sapiens
cctattgttaccctctttattccaaaacaattacacatttcaacttttcaaaagcaacatctgggtaagttaggaatattcacagcttcttacacagtgtcagagaaagagactatctgagctcaccaggtatctgctgtgtgttggggaaactgaaaaacaagcaaaagtataactacaatctggacttttttcttttttaaataaagttttttttttccatttttcttctcatactgtgaattgttcttgactccttttcttgacattcagttttcagaatttccatccttcctctggaactaatgtgctgttcccctgactgcctgctgggccagcatccgattgccagccagaaacgtcacactggccaagatggccaggtacttcaaggtctggaacatgttgagacgagtccagtagacatacatgagtcccagcatagcagcatgtcccaagtgaaatataatcgtg

SEQ ID NO: 417 - DNA, 369 bp, Homo sapiens
  misc_feature (1)..(369): "n" represents an unknown nucleotide
tgtggaaaccattgatttttattaatttcataactgggaaattccatgtgaaagtgaaacaagcatgagtcaagtcaaccagggaaggantctggggacaggccaaggagcgggaggtggggcagcgaggcantcctgctggtaggagccctgaggatttcccagcttntgtgcgctgcctctgnatcctagagacccggntttactcagctaggagagaggatggntcacagggtntaagggtggccattcagaggtagaagatggaggggcggcagattntggcagggcagcagagggntcagtggccatggctaagaggggtaaaaanttcaggacatcccccagggtgcttccctcagcccaggg

SEQ ID NO: 418 - DNA, 354 bp, Homo sapiens
  misc_feature (1)..(354): "n" represents an unknown nucleotide
ttggctctgctgacaaaaactcccgcaaaanggcccctcgtagcaaggtcccgccgccacgagactttcacatcaatctcttccgcatgcagccctggctaggcagcacctggggggatgtcctgaattttttacccctctagccatggccactgagccctctgctgccctgccagaatctgccgcccctccatcttctacctctgaatgggccacccttagaccctgtgatccatcctctctcctagctgagtaaatccgggttttagggatggcagagggcggcacacaagttggggaaattcttaggggtttctaacaggagggatttgcnttggtttgncccaactttcc

SEQ ID NO: 419 - DNA, 419 bp, Homo sapiens
aacggtttaacattttactaaatcaactcacacaaattccaaattgcaaatataattaaggacaacagattctgctttgccttattaaatctttcattttcaaatccatcaataagacaaaaagtaaccaaaaattaggtctgttgcaaattcatgattcttctgaggggggaaaccaaaagaacattagagtaaaaagaacgccactggaggatgtacaataaagcaccacaacacacgcttacaaacggggcttcctggcttcggtgacaggtaaaagacgctgttctccccactgctgtgcgtcaatcagggtttcattaaaataaaactataaaatctcctaggttacactaagtcagacacggtctggaacacagtgcttaacaacagtaatgccaactatcagtgctaacata

SEQ ID NO: 420 - DNA, 412 bp, Homo sapiens
  misc_feature (1)..(412): "n" represents an unknown nucleotide
ggctttgaggtggaggccataatcaatcctaccaatgctgacattgaccttaaagatgacctaggaaacacgctggagaagaaaggtggcaaggagtttgtggaagctgtcctggaactccggaaaaagaacgggcccttggaagtagctggagctgctgtcagcgcaggccatggctgcntgccaagtttgtgatccactgtaatagtccagtttggggtgcagacaagtgtgaagaacttctggaaaagacagtgaaaaactgcttggccctggctgatgataagaagctgaaatccattgcatttccatccatcggcagcggcaggaacggttttccaaagcagacagcagctcagctgattctgaaggccatctccagttacttcgtgtctacaatgtcctcttccat

SEQ ID NO: 421 - DNA, 367 bp, Homo sapiens
tttttttttttttttttggtagtgaatactttattttgttgtaaacaagttagttttgagggtatttcctcgtggtcctcctgccgtcactcgtccccatgttccaatgatgctgatcaactgctttattcagtttcccatctttcttcttgcccagtcatcgtagcctttctttttttaaacacatgatccctagtactcatctttggaggacaaaaggctttccatatgttagaaaaatttgaatctcatagtactcacaacaatgagcagcattgtaagttgtgatgcattcatttggattggaacattctcaatcagtccttccactctaagtaaatatttgtttctcacagaacacaaggca

SEQ ID NO: 422 - DNA, 343 bp, Homo sapiens
agaagggcacactttcatctaatttggggtatcactgagctgaagacaaagagaagggggagaaaacctagcagaccaccatgtgctatgggaagtgtgcacgatgcatcggacattctctggtggggctcgccctcctgtgcatcgcggctaatattttgctttactttcccaatggggaaacaaagtatgcctccgaaaaccacctcagccgcttcgtgtggttcttttctggcatcgtaggaggtggcctgctgatgctcctgccagcatttgtcttcattgggctggaacaggatgactgctgtggctgctgtggccatgaaaactgtggcaaacgatg

SEQ ID NO: 423 - DNA, 426 bp, Homo sapiens
  misc_feature (1)..(426): "n" represents an unknown nucleotide
ttttttttggttgagcacagggtactttattgatggtacatgacaaggtgcggctccctaggcccctcccctcttcaaggggtctacatggaaactgtgaggaggggagattcagtgtggtgggggactgagtgtggcagggactccccagcagtgagggtctctctcttcctcttgtgctcttgctggggctggtggtccaggggtcttactccttggaggccatgtgggcatgaggtccaccaccctgttgctgtagccaaattcgttgtcataccaggaaatgagcttgacaaagtggtcgttgagggcaatgccagccccagcgtcgaaggtgggaggagtnggtgtcgctgttgaagttcagagggagaccacctgggtgcttcagtgtagcccagggatgccctttgagggggccctccg

SEQ ID NO: 424 - DNA, 505 bp, Homo sapiens
  misc_feature (1)..(505): "n" represents an unknown nucleotide
gtcagcgcatcttcttttgcgtcgccagccgagccacatcgctgagacaccatggggaaggtgaaggtcggagtcaacggatttngtcgtattgggcgcctggtcaccagggctgcttttaactctggtaaagtggatattgttgccatcaatgaccccttcattgacctcaactacatggtttacatgttccaatatgattccacccatggcaaattccatggcaccgtcaaggctgagaacgggaagcttgtcatcaatggaaatcccatcaccatcttccagggagcgagatccctccaaaatcaagtggggcgatgctggcgctgagtacgtcgtggagtccactgggcgtcttcaccaccatgggagaaggctggggctcatttgcaggggggagccaaaagggtcattcatcttttgccccttntgctgacggccccngtttcgttcatgggtgttgaaccatgaggagttntgacaaacagcctcaagatcatcagca

SEQ ID NO: 425 - DNA, 808 bp, Homo sapiens
tgctcccttgggctctagagaggaggcccctcttagccctcagcccctccttcctctctatcttaaagtaatttgatcctcaggaatttgttccgccctcatctggcccggccaaatcccgatttgacaaatgccaggaaaaggaaactgttgagaaaccgaaactactggggaaagggagggctcactgagtaaccatcccagtaacccgaccgccgctggtcttcgctggacaccatgagtcacactgtccaaaccttcttctctcctgtcaacagtggccagccccccaactatgagatgctcaaggaggagcacgaggtggctgtgctgggggggccccacaaccctgctcccccgacgtccaccgtgatccacatccgcagcgagacctccgtgcccgaccatgtcgtctggtccctgttcaacaccctcttcatgaacccctgctgcctgggcttcatagcattcgcctactccgtgaagtctagggacaggaagatggttggcgacgtgaccggggcccaggcctatgcctccaccgccaagtgcctgaacatctgggccctgattctgggcatcctcatgaccattctgctcatcgtcatcccagtgctgatcttccaggcctatggatagatcaggaggcatcactgaggccaggagctctgcccatgacctgtatcccacgtactccaacttccattcctcgccctgcccccggagccgagtcctgtatcagccctttatcctcacacgcttttctacaatggcattcaataaagtgcacgtgtttctggtgctgctg

SEQ ID NO: 426 - DNA, 561 bp, Homo sapiens
ttttttttaccagaaacacgtgcactttattgaatgccattgtagaaaagcgtgtgaggataaagggctgatacaggactcggctccgggggcagggcgaggaatggaagttggagtacgtgggatacaggtcatgggcagactcctggcctcagtgatgcctcctgatctatccataggcctggaagatcagcactgggatgacgatgagcagaatggtcatgaggatgcccagaatcagggcccagatgttcaggcacttggcggtggaggcataggctgggcaccggtcacgtcgccaaccatcttcctgtccctagacttcacggagtaggcgaatctagtgaagcccaggcagcaggggttcatgaagagggtgttgaacagggaccagacgacatggtcggacacggaggtacacgctagcggatgttggatcacggtggacgttcgggggagcagggttgtgtgggcgccccaagcacagccacctcgtgctccttcctgagcatctcatagttggggggctggcactgttgacaggagagaaaaagtttggac

SEQ ID NO: 427 - DNA, 545 bp, Homo sapiens
  misc_feature (1)..(545): "n" represents an unknown nucleotide
gtccaaaccattcttctctcctgtcaacagtggccagccccccaactatgagatgcatcaaggaggacacgaggtgctgtctgggggcgcccacaaccctgctcccccgacgtccaccgtgatccacatccgcagcgagacctccgtgcccgaccatgtgtctggtccctgttcaacaccctcttcatgaacccctgctgcctgggcttcatagcattcgcctactccgtgaagtctagggacaggaagatggttggcgacgtgaccggggcccaggcctatgctccaccgccaagtgcctgaacatctgggccctgattctgggcatctcatgaccattctgctcatcgtcatccagtgctgatcttcaggcctatggatagatcaggaggcatcactgaggccaggagctctgcccatgacctgtatcgcacgtactccaacttccattcctcgccctgcccccggagccgagtcctgtatcagccctttatcctcacacgcttttctacaatggcattcaataaagtgcacgtgtntctggt

SEQ ID NO: 428 - DNA, 607 bp, Homo sapiens
  misc_feature (1)..(607): "n" represents an unknown nucleotide
ttccgatcaaaatgcttttattagaatactaataaatgcagattaaaaaaaaaaaacctcacacagaaaaagaggaaaacactcagaaatgtgattacagattaggcatattagaggaaaaagagttcttcagggtatacaaaatgtaaacatttgccctgggatttcccacagatggcacagtccacatggactcttttggaacaaaaaaatgtctattaagtctccaggatagcctctatgacatctgcaaacttgccacattaaaagttaaagttcctaaaactttctacgcaaaacacaaaatggctcccaatccaggcaactggcacatgtggaagcagaataccaaagcaaatccgtcttccaaccatcagcttcgactccctccagctactgtatttacatttaccttgacaggagattaccngggatatacncagtatataaaactcctacttgaggctgggggtgggagatgaaatctttcctggctatccaatgcccgggggagagggcatcaatcagtccttaacntaggggggagaggnctaagaagacgccncttttgttcggaaatggggactcntaaacttccatgggnggg

SEQ ID NO: 429 - DNA, 341 bp, Homo sapiens
  misc_feature (1)..(341): "n" represents an unknown nucleotide
ncgatattaaangccaactacatggccaagcgattagaancacactacagaattcttttcaggggtgcaagaggttatgtgggtcatgaatttattttggacacgagacccttcaaaaagtctgcaaatattgaggctgtggatgtggccaagagactccaggattatggatttcacgcccctaccatgtcctggcctgtgnagggaccctcatggtggagcccactgagtcggaggacaaggcagagctggacagattctgtgatgccatgatcagcattcggcaggaaaattgctgacattgaggaagggccgcatcgacccccagggtcaatnccgct

SEQ ID NO: 430 - DNA, 425 bp, Homo sapiens
  misc_feature (1)..(425): "n" represents an unknown nucleotide
aagaggaggaaatggggtgtgatgggtcaaaggcaggaaaggtaagccatggtcctcaaaccaaagagccctctctgtaggtcctctgatctttgagtgtgagctcaagctctccagtggacacagaaaaaggcctggtagtaagtggtttgcattgtgaggtatgaggatccctggtaaattcagcagcatgtggtttttggaaatcagcccacaagataagaacactgcaaccaaactcataactaatactgctaatttaactattgtcccaaaagagaaagggaagangaaaaaaatccccactctacctgggaggttcctnggttttccattaaggttttcccaatggccttttttaatcccnagggtttcttaggggatttccccnttcgggncccctttttttccgttaaaggcncttt

SEQ ID NO: 431 - DNA, 462 bp, Homo sapiens
  misc_feature (1)..(462): "n" represents an unknown nucleotide
ttctgggtgtgcatctgttgaaatgctcaagacttaattatttgccttttgaaatcactgtaaatgcccccatccggttcctcttcttcccaggtgtgccaaggaattaatcttggtttcactacaattaaaattcactcctttccaatcatgtcattgaaagtgcctttaacgaaagaaatggtcactgaatgggaattctcttaagaaaccctgagattaaaaaaagactatttggataacttataggaaagcctaggaacctcccagtagagtggggatttttttcttcttccctttctcttttggacaatagttaaattaggcagtattagttatgagtttggttgcagtgttcttatcttgtggggctgatttccaaaaaccacatggctgctggaatttaccaggggtccctcatacctcacanggcaaaccacttactaccagggctttttctgt

SEQ ID NO: 432 - DNA, 317 bp, Homo sapiens
  misc_feature (1)..(317): "n" represents an unknown nucleotide
acactgagagccccaggngggtctttaactcccttcctcagattatattcancccagaaatatagccttggacaataatttggttacagcatagtcccagggatgaggtcccccaaattgctaagttttacataggggagactgggaaattcaaagaattggatggagaaaccataggatccaagntaatgtcagggggttgaagatgttggagaggcatggtagcatcattgagtttgaatctccttctcacttgggagtgggaagttgtagggttctgcctctagggaaatgtgccatccttctggaataattgg

SEQ ID NO: 433 - DNA, 360 bp, Homo sapiens
  misc_feature (1)..(360): "n" represents an unknown nucleotide
caccatggtgctgtctcctgccgacaagaccaacgtcaaggccgcctggggtaaggtcggcgcgcacgtggcgagtatggtgcggaggccctggagaggatgttcctgtccttccccaccaccaagacctacttcccgcacttcgacctgagccacggctctgcccaggttaagggccacggcaagaaggtggccgacgcgctgaccaacgccgtggccacgtggacgacatgcccaacgngctgtccgncctgagcgacctgcacgcgcacaagcttcgggtggacccggtgcaacttcaagctccttaagccactgcctgctggtgaccctgggccgcccaccttccccgncgagttt

SEQ ID NO: 434 - DNA, 403 bp, Homo sapiens
catgttttaaaaaagtgacattgctttattactattggcaggtggggcctgcatgaggtggttagtgtgctcaggggatgggtgggctgtggagatgatgacagaaaggctggaaggaaagggggtgggtttgaaggccagggccaaggggtcctcaggtccgcttctgggaagggacagccttgaggaaggagtcatggcaagccatagctaggccaccaatcagattaagaaattctgagaaatctagctgaccatcactgttggtgtccagtttcttcatcatgcggtcaaggacaccagggtccttctggttctttgtgaaggcagctagttctgtattcatgaagcttaggaactctgtcttggagagagtgtagttataaccatcctttccagcata

SEQ ID NO: 435 - DNA, 1661 bp, Homo sapiens
tgctgcagccgctgccgccgattccggatctcattgccacgcgcccccgacgaccgcccgacgtgcattcccgattccttttggttccaagtccaatatggcaactctaaaggatcagctgatttataatcttctaaaggaagaacagaccccccagaataagattacagttgttggggttggtgctgttggcatggcctgtgccatcagtatcttaatgaaggacttggcagatgaacttgctcttgttgatgtcatcgaagacaaattgaagggagagatgatggatctccaacatggcagccttttccttagaacaccaaagattgtctctggcaaagactataatgtaactgcaaactccaagctggtcattatcacggctggggcacgtcagcaagagggagaaagccgtcttaatttggtccagcgtaacgtgaacatatttaaattcatcattcctaatgttgtaaaatacagcccgaactgcaagttgcttattgtttcaaatccagtggatatcttgacctacgtggcttggaagataagtggttttcccaaaaaccgtgttattggaagtggttgcaatctggattcagcccgattccgttacctgatgggggaaaggctgggagttcacccattaagctgtcatgggtgggtccttggggaacatggagattccagtgtgcctgtatggagtggaatgaatgttgctggtgtctctctgaagactctgcacccagatttagggactgataaagataaggaacagtggaaagaggttcacaagcaggtggttgagagtgcttatgaggtgatcaaactcaaaggctacacatcctgggctattggactctctgtagcagatttggcagagagtataatgaagaatcttaggcgggtgcacccagtttccaccatgattaagggtctttacggaataaaggatgatgtcttccttagtgttccttgcattttgggacagaatggaatctcagaccttgtgaaggtgactctgacttctgaggaagaggcccgtttgaagaagagtgcagatacactttgggggatccaaaaggagctgcaattttaaagtcttctgatgtcatatcatttcactgtctaggctacaacaggattctaggtggaggttgtgcatgttgtcctttttatctgatctgtgattaaagcagtaatattttaagatggactgggaaaaacatcaactcctgaagttagaaataagaatggtttgtaaaatccacagctatatcctgatgctggatggtattaatcttgtgtagtcttcaactggttagtgtgaaatagttctgccacctctgacgcaccactgccaatgctgtacgtactgcatttgccccttgagccaggtggatgtttaccgtgtgttatataacttcctggctccttcactgaacatgcctagtccaacattttttcccagtgagtcacatcctgggatccagtgtataaatccaatatcatgtcttgtgcataattcttccaaaggatcttattttgtgaactatatcagtagtgtacattaccatataatgtaaaaagatctacatacaaacaatgcaaccaactatccaagtgttataccaactaaaacccccaataaaccttgaacagtg

SEQ ID NO: 436 - DNA, 376 bp, Homo sapiens
tttttttttttttttttttttttttttttttttcactgttcaaggtttattgggggttttagttggtataacacttggatagttggttgcattgtttgtatgtagatctttttacattatatggtaatgtacactactgatatagttcacaaaataagatcctttggaagaattatgcacaagacatgatattggatttatacactggatcccaggatgtgactcactgggaaaaaatgttggactaggcatgttcagtgaaggagccaggaagttatataacacacggtaaacatccacctggctcaaggggcaaatgcagtacgtacagcattggcagtggtgcgtcagaggtggcagaactatttcacactaa

SEQ ID NO: 437 - DNA, 272 bp, Homo sapiens
ccacgcgtccgggatctccaacatggcagccttttccttagaacaccaaagattgtctctggcaaagactataatgtaactgcaaactccaagctggtcattatcacggctggggcacgtcagcaagagggagaaagccgtcttaatttggtccagcgtaacgtgaacatctttaaattcatcattcctaatgttgtaaaatacagcccgaactgccagttgcttattgtttcaaatcccgtggaaatcttgacctaagtgggcttgggaag

SEQ ID NO: 438 - DNA, 465 bp, Homo sapiens
tgtctaaaaaaggacaaaaatgcatttatttaatatacaagggctcaaccgaggcttaatttaaaagacaaaaacaaaacaaaaataccacagctcaagataaagagtcctatacagaaatcacaaaaaggacagaccatctaaggaaaaattaaaaagacgacacaaggacaggctgggcagcctgggtcagggctcctggctggtgacctgctttgagtaggtttcttgcaggtacttcttaaaagctgtggggtttttccagagctcggcagcatgtgtgttcaagggactatcaatgttgggttctcctagaaggctctggatggagagcagaatggtcctgacatcatacagggcagaccacttttccttcaggatgtccaggcatatgttacactgggtgtccacattggggtgatagcagagcttgaggaacttcactgtgggcccattgtaagggaa

SEQ ID NO: 439 - DNA, 3805 bp, Homo sapiens
gagaatcaaaggttagcttatgttacatatcaagatattcgaaaaattagtggccttaaagaccaaactgttatagttgtgaaagcccctccagaaacaagacttgaagtgcctgactcaatagagagcctacaaatacatttggcaagtacccaagggcccattgaggtttacttatgtccagaagagactgaaacacacagtccaatgaaaacaaacaaccaagaccacaatgggaatatccctaaacccgcttccaaagacttggcttcaaccaactcaggacatagcgattgctcagtttctatgggaaacctttctcctctggcctccccagccaacctcttacagcagactgaggaccaaattccttccaacctagaaggaccgtttgtgaacttactgcctcccctgctgcaagaggactatctcctgagcctcggggaggaggaaggcatcagcgatctcttcgatgcttacgatttggaaaagctcccactggtggaagacttcatgtgtagttgattatgcttcgtgtgaactctccttaaaaaccgatatttttttatcatggaaccagaacatctgtcatgcagtgttgtcccttcctaccttcttcctccaagagagtatcatgaagtaaactacaaacttcagaagaaagctgacattttaatgaattttttaaaaaattaataaacaaattgtctaaacgcacagttgcaggctcccttgggaaagccctgctttgctccaggctccaagatctcctggctaagtcagcaagtgagaaaatgtgcaatcaggtgtctctcaccccgaattgtccttcctccttcctccccggattggcttgctgtgcctgacggatgggctgtagaatggggtctggccacctggcctgctgggaaacagcaatcttccttaatagcatttcaagccgtgccttctccgcagaatgcatgtctttgaggtctgctaatatggaatggaactgcagcaaatgcaaacttgaagtcatgcaaaagtatgaaatggatttcttcagctcttcttaggaatatttaaattactgtcataattcagtttaagctatgaactgtgtgtcccagtaggaggtcaagaaaacctccacagccttctggatgaagaacctgttttcaaatatacttgttgcagatacagaagactagtagagttctgccactctaagctgttgtggattttcctgtctccatgaaccactcccattcccccgtccccaatgtgtttgtgagtttccagttgatttgtagcaaatgcctacttagttctttgtggattgttctagacttttaatttttttagctgccatttaagcattcctgtggcacccatcaccatttcaatttaattgtttactttgaagcggtttttgcaaattcatattacttaagcagagggagagaacctctactgatcagagcatctaaacctgtgtgatctaaggtttatcagcctctgcaaggagctttgtcccatcgtgcttccattcccaggagggggagcttggagcgagtcagtcctggggcttgctgacatgggtggcccattggaaaggagaaccaggtcagatgatgtaacagccccaaggagcagcaggcatgggtccctccatccttgggcttcccgggcccctgtgacaggggaaagggctctcttacaccgcactcagggagaccacttctcaggatggggtcagatggagagacctctagggagaaagacatccccattgtgtgagtggcatttccttaagctggcaggaacagggagcagccctgtgtcgggggctggaatagttctggccagaccccgttccccttcctctatgaaggaataagttggaccaagggaagtcggggacgtaaaaaatgaagcaaaacaatgccagggtgtctcccgctttactcttcaggaatggtgtcccaagttggaggctttgtgtcagctgcaaatcctaccagttatgtccaagaatggctttccctcgggcaggtggcagcggccatctcccactgggaatatggcgtagtatctccggtccattccttggatgctaaggactgcgggaatgagggagtcagataaagaacaaacctcgaaacgaacagttaaattgaaatgctatgtgcctgacccaatggtaggcacatagtaggcactcaactcatatgtttaattgaattgaaaatatcccttaggaaaaaaaaaaaacacacaaaaaaccacaagagccccagccagtttactccaggtagatttccacaatatgcaaagtggtggtggggtcaagacagatgacaccagcactttaaactctttgtgtgggtatgcgtgggtgtatgtttgggaagaaaaacaaaggtgcagactatcttcctttttttcttcttcagcctccatccctggcctcctcccctcacacacactggacttggtacaaaatgtcggtgtggtcctagatgaagcattggggtgggggagggagagggagctttgtgttaagtgcctactggaaatgcactgtggggttttttcctgtatgggaaaccatttatgccaagcttttccccatttcccatatttatctcatctggttagctgcctctgcttccagctttgtgtaattctctttgccagctgcacaaagctgattttttccaaagtctaaagactgagctcacctggctagattgttgtgtgttttgttgaattttttcataatgtaatgccgtatttattgtttttaaaatgaaaggaatactaataagtcttaaaagttccttcatgcataagatttttttccagttactgggcttaactggtgtacattaattagatgtccatactgtattttgtttgcattaagtaattttctttttgacttagtatccggcacacaaagtgggttagtactacagtatttgcgttactttaagtactaagtatgcaggtttcctggtaccattgagttgctgctattaaagctcacacacgaaatggctaaaagttacaagtgtgcaaattatgactgcgtgagccttagaaaataaaatgtataaagggcaacacatgagctgtcaaacagtgttaggagtgtgtttatatgtacagagttgtgcatagcaatcgttttatttaagttgatatgtagtctactcacattttcattatttagcaattttgtacaaaaatagcaattaatttgtaaacactgccagaatactttctagctgctttgtaattttttaagagtgttattttgtttttgtttttctgttctttgttgtggctcttgttttcatttttgttgtacgtgtagatctgtaaataaaattgcagtatttaaagcttaagctttcaggaaaaagaaaataagaattcagtgtgtgcatgacaactcgtgtgtatgagaaggagggatatgaaggaagatggcttgcagagtaagtcgggtggcaattgtcagggtgtgggaatttcttttcctacggggtacgtgattttgtaaaaaggaagtatttctcccaaaattgggagtaggcaaactactaatcagtttagctttgtgttgtatgctagtttaaaaaagaaaatatgtaatataatgtaaaaaaaaacaaaaaaaagcttttatgatggattttgtaaatagatttgttacagggtgacctgttctctagctgtgatcttaccacttcaaatgggtgtaatttgaataaattttgtatggtaaaggatcaataaaatgattttttttaag

SEQ ID NO: 440 - DNA, 534 bp, Homo sapiens
  misc_feature (1)..(534): "n" represents an unknown nucleotide
ttttttttaactcttaaaaaaaatcattttattgatcctttaccatacaaaatttattcaaattacacccatttgaagtggtaagatcacagctagagaacaggtcaccctgtaacaaatctatttacaaaatccatcataaaagcttttttttgtttttttttacattatattacatattttcttttttaaaagcatacaacacaaagctaaactgattagtagtttgcctactcccaattttgggagaaatacttcctttttacaaaatcacgtnccccgtaggaaaagaaattcccacaccctgacaattggccaaccgacttactctgcaagccatcttcttcaaatccctccttctcatacacacgangttgtcatgcacacactgaatcntaatttcttttccnggaagcttaancctttaaataccgggaattattttcagatctncacgtnccaacaaaaatggaaacaagggccccaccaagnccgggaaaacnaaacccaataccctnttaaaaatttcaaggc

SEQ ID NO: 441 - DNA, 365 bp, Homo sapiens
tccaaagtctaaagactgagctcacctggctagattgttgtgtgttttgttgaattttttcataatgtaatgccgtatttattgtttttaaaatgaaaggaatactaataagtcttaaaagttccttcatgcataagatttttttccagttactgggtttaactggtgtacattaattagatgtccatactgtattttgtttgcattaagtaattttctttttgacttagtatccggcacacaaagtgggttaagtactacagtatttgccgttactttaagtactaagtatgcaggtttcctggtaccattgagttgctgctattaaagctcacacaccgaaatgggctaaaagttacaagtgt

SEQ ID NO: 442 - DNA, 4778 bp, Homo sapiens
gcttgcggaagtcagttcagactccagcccgctccagcccggcccgacccgaccgcacccggcgcctgccctcgctcggcgtccccggccagccatgggcccttggagccgcagcctctcggcgctgctgctgctgctgcaggtctcctcttggctctgccaggagccggagccctgccaccctggctttgacgccgagagctacacgttcacggtgccccggcgccacctggagagaggccgcgtcctgggcagagtgaattttgaagattgcaccggtcgacaaaggacagcctatttttccctcgacacccgattcaaagtgggcacagatggtgtgattacagtcaaaaggcctctacggtttcataacccacagatccatttcttggtctacgcctgggactccacctacagaaagttttccaccaaagtcacgctgaatacagtggggcaccaccaccgccccccgccccatcaggcctccgtttctggaatccaagcagaattgctcacatttcccaactcctctcctggcctcagaagacagaagagagactgggttattcctcccatcagctgcccagaaaatgaaaaaggcccatttcctaaaaacctggttcagatcaaatccaacaaagacaaagaaggcaaggttttctacagcatcactggccaaggagctgacacaccccctgttggtgtctttattattgaaagagaaacaggatggctgaaggtgacagagcctctggatagagaacgcattgccacatacactctcttctctcacgctgtgtcatccaacgggaatgcagttgaggatccaatggagattttgatcacggtaaccgatcagaatgacaacaagcccgaattcacccaggaggtctttaaggggtctgtcatggaaggtgctcttccaggaacctctgtgatggaggtcacagccacagacgcggacgatgatgtgaacacctacaatgccgccatcgcttacaccatcctcagccaagatcctgagctccctgacaaaaatatgttcaccattaacaggaacacaggagtcatcagtgtggtcaccactgggctggaccgagagagtttccctacgtataccctggtggttcaagctgctgaccttcaaggtgaggggttaagcacaacagcaacagctgtgatcacagtcactgacaccaacgataatcctccgatcttcaatcccaccacgtacaagggtcaggtgcctgagaacgaggctaacgtcgtaatcaccacactgaaagtgactgatgctgatgcccccaataccccagcgtgggaggctgtatacaccatattgaatgatgatggtggacaatttgtcgtcaccacaaatccagtgaacaacgatggcattttgaaaacagcaaagggcttggattttgaggccaagcagcagtacattctacacgtagcagtgacgaatgtggtaccttttgaggtctctctcaccacctccacagccaccgtcaccgtggatgtgctggatgtgaatgaagcccccatctttgtgcctcctgaaaagagagtggaagtgtccgaggactttggcgtgggccaggaaatcacatcctacactgcccaggagccagacacatttatggaacagaaaataacatatcggatttggagagacactgccaactggctggagattaatccggacactggtgccatttccactcgggctgagctggacagggaggattttgagcacgtgaagaacagcacgtacacagccctaatcatagctacagacaatggttctccagttgctactggaacagggacacttctgctgatcctgtctgatgtgaatgacaacgcccccataccagaacctcgaactatattcttctgtgagaggaatccaaagcctcaggtcataaacatcattgatgcagaccttcctcccaatacatctcccttcacagcagaactaacacacggggcgagtgccaactggaccattcagtacaacgacccaacccaagaatctatcattttgaagccaaagatggccttagaggtgggtgactacaaaatcaatctcaagctcatggataaccagaataaagaccaagtgaccaccttagaggtcagcgtgtgtgactgtgaaggggccgccggcgtctgtaggaaggcacagcctgtcgaagcaggattgcaaattcctgccattctggggattcttggaggaattcttgctttgctaattctgattctgctgctcttgctgtttcttcggaggagagcggtggtcaaagagcccttactgcccccagaggatgacacccgggacaacgtttattactatgatgaagaaggaggcggagaagaggaccaggactttgacttgagccagctgcacaggggcctggacgctcggcctgaagtgactcgtaacgacgttgcaccaaccctcatgagtgtcccccggtatcttccccgccctgccaatcccgatgaaattggaaattttattgatgaaaatctgaaagcggctgatactgaccccacagccccgccttatgattctctgctcgtgtttgactatgaaggaagcggttccgaagctgctagtctgagctccctgaactcctcagagtcagacaaagaccaggactatgactacttgaacgaatggggcaatcgcttcaagaagctggctgacatgtacggaggcggcgaggacgactaggggactcgagagaggcgggccccagacccatgtgctgggaaatgcagaaatcacgttgctggtggtttttcagctcccttcccttgagatgagtttctggggaaaaaaaagagactggttagtgatgcagttagtatagctttatactctctccactttatagctctaataagtttgtgttagaaaagtttcgacttatttcttaaagcttttttttttttcccatcactctttacatggtggtgatgtccaaaagatacccaaattttaatattccagaagaacaactttagcatcagaaggttcacccagcaccttgcagattttcttaaggaattttgtctcacttttaaaaagaaggggagaagtcagctactctagttctgttgttttgtgtatataattttttaaaaaaaatttgtgtgcttctgctcattactacactggtgtgtccctctgcctttttttttttttttaagacagggtctcattctatcggccaggctggagtgcagtggtgcaatcacagctcactgcagccttgtcctcccaggctcaagctatccttgcacctcagcctcccaagtagctgggaccacaggcatgcaccactacgcatgactaattttttaaatatttgagacggggtctccctgtgttacccaggctggtctcaaactcctgggctcaagtgatcctcccatcttggcctcccagagtattgggattacagacatgagccactgcacctgcccagctccccaactccctgccattttttaagagacagtttcgctccatcgcccaggcctgggatgcagtgatgtgatcatagctcactgtaacctcaaactctggggctcaagcagttctcccaccagcctcctttttatttttttgtacagatggggtcttgctatgttgcccaagctggtcttaaactcctggcctcaagcaatccttctgccttggccccccaaagtgctgggattgtgggcatgagctgctgtgcccagcctccatgttttaatatcaactctcactcctgaattcagttgctttgcccaagataggagttctctgatgcagaaattattgggctcttttagggtaagaagtttgtgtctttgtctggccacatcttgactaggtattgtctactctgaagacctttaatggcttccctctttcatctcctgagtatgtaacttgcaatgggcagctatccagtgacttgttctgagtaagtgtgttcattaatgtttatttagctctgaagcaagagtgatatactccaggacttagaatagtgcctaaagtgctgcagccaaagacagagcggaactatgaaaagtgggcttggagatggcaggagagcttgtcattgagcctggcaatttagcaaactgatgctgaggatgattgaggtgggtctacctcatctctgaaaattctggaaggaatggaggagtctcaacatgtgtttctgacacaagatccgtggtttgtactcaaagcccagaatccccaagtgcctgcttttgatgatgtctacagaaaatgctggctgagctgaacacatttgcccaattccaggtgtgcacagaaaaccgagaatattcaaaattccaaattttttcttaggagcaagaagaaaatgtggccctaaagggggttagttgaggggtagggggtagtgaggatcttgatttggatctctttttatttaaatgtgaatttcaacttttgacaatcaaagaaaagacttttgttgaaatagctttactgtttctcaagtgttttggagaaaaaaatcaaccctgcaatcactttttggaattgtcttgatttttcggcagttcaagctatatcgaatatagttctgtgtagagaatgtcactgtagttttgagtgtatacatgtgtgggtgctgataattgtgtattttctttgggggtggaaaaggaaaacaattcaagctgagaaaagtattctcaaagatgcatttttataaattttattaaacaattttgtt

SEQ ID NO: 443 - DNA, 442 bp, Homo sapiens
  misc_feature (1)..(442): "n" represents an unknown nucleotide
cgtttaacaaaattgtttaataaaatttataaaaatgcatctttgagaatacttttctcagcttgaattgttttccttttccacccccaaagaaaatacacaattatcagcacccacacatgtatacactcaaaactacagtgacattctctacacagaactatattcgatatagcttgaactgccgaaaaatcaagacaattccaaaaagtgattgcagggttgatttttttctccaaaacactttgagaaacacgtaaagctatttcaacaaaagtcttttctttgattgtcaaaagttgaaattcacatttaaataaaaagagatccaaatcaagatcctcactnaccccctacccctcaactgaacccccttttagggccacattttcttcttgctcctaagaaaaaaatttggaattttgaatattctcggttttct

SEQ ID NO: 444 - DNA, 386 bp, Homo sapiens
  misc_feature (1)..(386): "n" represents an unknown nucleotide
ctcttgcaagttantcttacctcaatgtggctgacttgacttccctccgggccccactggacatccccatcccagaccctccacccaaggatgatgagatggaaacagataagcaggagaagaaagaagtccctaagtgtggatttctccctgggaatgagaaagtcctgtccctgcttgccctggttaagccagaagtctggactctcaaagagaaatgcattctggtgattacatggatccaacacctgatccccaagattgaagatggaaatgattttggggtagcaatccagggagaaggtgctggagagggtgaatgccgtcaagaccaaagtggaagcttttccagacaaccatttccaggtactttttnagaacgtggg

SEQ ID NO: 445 - DNA, 375 bp, Homo sapiens
  misc_feature (1)..(375): "n" represents an unknown nucleotide
cacacaacatatagatcatttattttccttctagtcccgggttcagtacatagatggcttttcttcaccctttgggttgacaattttctccaggttgctgctgatgatatgataaagctcagcatagaaggccctcaggtccagcaccatggccctgagctccccataggctgcctcatctcgctcatgcaccaaggcccggtaatccattacatgagtctccttggaggccttggcatcagcatccccacgttctgagaagtacttggaaatggttgtctggaaagcttccactttngtcttgacggcattcaccctntccagcaccttctccgggattgctaccccaaaatcatttccatttttcantttggg

SEQ ID NO: 446 - DNA, 1878 bp, Homo sapiens
gggcgcagcggggcccgtctgcagcaagtgaccgacggccgggacggccgcctgccccctctgccacctggggcggtgcgggcccggagcccggagcccgggtagcgcgtagagccggcgcgatgcacgtgcgctcactgcgagctgcggcgccgcacagcttcgtggcgctctgggcacccctgttcctgctgcgctccgccctggccgacttcagcctggacaacgaggtgcactcgagcttcatccaccggcgcctccgcagccaggagcggcgggagatgcagcgcgagatcctctccattttgggcttgccccaccgcccgcgcccgcacctccagggcaagcacaactcggcacccatgttcatgctggacctgtacaacgccatggcggtggaggagggcggcgggcccggcggccagggcttctcctacccctacaaggccgtcttcagtacccagggcccccctctggccagcctgcaagatagccatttcctcaccgacgccgacatggtcatgagcttcgtcaacctcgtggaacatgacaaggaattcttccacccacgctaccaccatcgagagttccggtttgatctttccaagatcccagaaggggaagctgtcacggcagccgaattccggatctacaaggactacatccgggaacgcttcgacaatgagacgttccggatcagcgtttatcaggtgctccaggagcacttgggcagggaatcggatctcttcctgctcgacagccgtaccctctgggcctcggaggagggctggctggtgtttgacatcacagccaccagcaaccactgggtggtcaatccgcggcacaacctgggcctgcagctctcggtggagacgctggatgggcagagcatcaaccccaagttggcgggcctgattgggcggcacgggccccagaacaagcagcccttcatggtggctttcttcaaggccacggaggtccacttccgcagcatccggtccacggggagcaaacagcgcagccagaaccgctccaagacgcccaagaaccaggaagccctgcggatggccaacgtggcagagaacagcagcagcgaccagaggcaggcctgtaagaagcacgagctgtatgtcagcttccgagacctgggctggcaggactggatcatcgcgcctgaaggctacgccgcctactactgtgagggggagtgtgccttccctctgaactcctacatgaacgccaccaaccacgccatcgtgcagacgctggtccacttcatcaacccggaaacggtgcccaagccctgctgtgcgcccacgcagctcaatgccatctccgtcctctacttcgatgacagctccaacgtcatcctgaagaaatacagaaacatggtggtccgggcctgtggctgccactagctcctccgagaattcagaccctttggggccaagtttttctggatcctccattgctcgccttggccaggaaccagcagaccaactgccttttgtgagaccttcccctccctatccccaactttaaaggtgtgagagtattaggaaacatgagcagcatatggcttttgatcagtttttcagtggcagcatccaatgaacaagatcctacaagctgtgcaggcaaaacctagcaggaaaaaaaaacaacgcataaagaaaaatggccgggccaggtcattggctgggaagtctcagccatgcacggactcgtttccagaggtaattatgagcgcctaccagccaggccacccagccgtgggaggaagggggcgtggcaaggggtgggcacattggtgtctgtgcgaaaggaaaattgacccggaagttcctgtaataaatgtcacaataaaacgaatgaatg

SEQ ID NO: 447 - DNA, 418 bp, Homo sapiens
accattttcattcattcgttttattgtgacatttattacaggaacttccgggtcaattttcctttcgcacagacaccaatgtgcccaccccttgccacgcccccttcctcccacggctgggtggcctggctggtaggcgctcataattacctctggaaacgagtccgtgcatggctgagacttcccagccaatgacctggcccggccatttttctttatggcgttgtttttttttcctgctaaggttttgcctgcacagcttgtaaggatcctcgttcattggatgctgccacttgaaaaactgatcaaaaagccatatgctgctcatgtttcctaatactctcacaccttttaaaggttggggatagggaaggggaaaggtctccacaaaaggcagttggtctgctgggttcctggg

SEQ ID NO: 448 - DNA, 439 bp, Homo sapiens
  misc_feature (1)..(439): "n" represents an unknown nucleotide
gcantctccgtcctctacttcgatgacagctccaacgtcatcctgaagaaatacagaaacatggtggtccgggcctgtgntcgccactagctcctccgagaattcagaccctttgggccaagtttttctggatcctccattgctcgccttggcaggaaccagcagaccaactgccttttgtgagaccttcccctccctatccccaactttaaaggtgtgagagtattaggaaacatgagcagcatatggcttttgatcagtttttcagtggcagcatccaattgaacaagatcctacaagctgtgcagggcaaaacctagcaggaaaaaaaaacaacgcataaagaaaaatggccgggcaggtcattggctgggaagtctcagccatgcacggactcgtttccagaggtaattatgagcgcctaccagccaggccacca

SEQ ID NO: 449 - DNA, 545 bp, Homo sapiens
ttttttttttttttttcaatgtttagaacattttattaaagtacaaaattgttggaatttagctaatagaaaaacatagtaaatatttacaaaaacgttgataacattactcaagtcacacacatataacaatgtagacaggtcttaacaaagtttacaaattgaaattatggagatttcccaaaatgaatctaatagctcattgctgagcatggttatcaatataacatttaagatcttggatcaaatgttgtccccgagtcttctgcaatccagtcctcttagaaattggtttctctctttgggagattcagactcagaggcagccagaggggacaggtcaagagctgaaataatcacataactactctaattttcttcattctattgactgtgtcaagttatagacacagccaaagtgtttttcttcggcctctgatgatttgagaagatgaaaaacatgagcaatttctcattgcttaaagaaaaacttggcacataagaggctgagtgtagtagagtatctgtactagaaccataaagtt

SEQ ID NO: 450 - DNA, 1639 bp, Homo sapiens
acaaactttcagagacagcagagcacacaagcttctaggacaagagccaggaagaaaccaccggaaggaaccatctcactgtgtgtaaacatgacttccaagctggccgtggctctcttggcagccttcctgatttctgcagctctgtgtgaaggtgcagttttgccaaggagtgctaaagaacttagatgtcagtgcataaagacatactccaaacctttccaccccaaatttatcaaagaactgagagtgattgagagtggaccacactgcgccaacacagaaattattgtaaagctttctgatggaagagagctctgtctggaccccaaggaaaactgggtgcagagggttgtggagaagtttttgaagagggctgagaattcataaaaaaattcattctctgtggtatccaagaatcagtgaagatgccagtgaaacttcaagcaaatctacttcaacacttcatgtattgtgtgggtctgttgtagggttgccagatgcaatacaagattcctggttaaatttgaatttcagtaaacaatgaatagtttttcattgtaccatgaaatatccagaacatacttatatgtaaagtattatttatttgaatctacaaaaaacaacaaataatttttgaatataaggattttcctagatattgcacgggagaatatacaaatagcaaaattgggccaagggccaagagaatatccgaactttaatttcaggaattgaatgggtttgctagaatgtgatatttgaagcatcacataaaaatgatgggacaataaattttgccataaagtcaaatttagctggaaatcctggatttttttctgttaaatctggcaaccctagtctgctagccaggatccacaagtccttgttccactgtgccttggtttctcctttatttctaagtggaaaaagtattagccaccatcttacctcacagtgatgttgtgaggacatgtggaagcactttaagttttttcatcataacataaattattttcaagtgtaacttattaacctatttattatttatgtatttatttaagcatcaaatatttgtgcaagaatttggaaaaatagaagatgaatcattgattgaatagttataaagatgttatagtaaatttattttattttagatattaaatgatgttttattagataaatttcaatcagggtttttagattaaacaaacaaacaattgggtacccagttaaattttcatttcagataaacaacaaataattttttagtataagtacattattgtttatctgaaattttaattgaactaacaatcctagtttgatactcccagtcttgtcattgccagctgtgttggtagtgctgtgttgaattacggaataatgagttagaactattaaaacagccaaaactccacagtcaatattagtaatttcttgctggttgaaacttgtttattatgtacaaatagattcttataatattatttaaatgactgcatttttaaatacaaggctttatatttttaactttaagatgtttttatgtgctctccaaattttttttactgtttctgattgtatggaaatataaaagtaaatatgaaacatttaaaatataatttgttgtcaaagt

SEQ ID NO: 451 - DNA, 454 bp, Homo sapiens
  misc_feature (1)..(454): "n" represents an unknown nucleotide
atattttaaatgtttcatatttacttttatatttccatacaatcagaaacagtaaaaaaaatttggagagcacataaaaacatcttaaagttaaaaatataaagccttgtatttaaaaatgcagtcatttanataatattataagaatctatttcgtacataataaacaagtttcaaccagcaagaaattactaatattgactgtggagttttggctgttttaatacgttctaactcattattccgtaattcaacacagcactaccaacacagctggcaatgacaagactgggagtatcaaactaggattgttagttcaattaaaatttcagataaacaataatgtacttatactaaaaaattatttgttggtttatctgaaatgaaaatttaactggggacccaattggtttggtttggttaatcnaaaaaacccnggattggaaatttatct

SEQ ID NO: 452 - DNA, 339 bp, Homo sapiens
caggaagaaaccaccggaagaaccatctcactgtgtgtaaacatgacttccaagctggccgtggtctcttggcagccttcctgatttctgcagctctgtgtgaaggtgcagttttgccaaggagtgctaaagaacttagatgtcagtgcataaagacatactccaaacctttccaccccaaatttatcaaagaactgagagtgattgagagtggaccacactgcgccaacacagaaattattgtaaagctttctgatggaagagagctctgtctggaccccaaggaaaactgggtgcagagggttgtggagaagtttttgaagagggctgagaattcat

SEQ ID NO: 453 - DNA, 1895 bp, Homo sapiens
gctttccagccccaaccatgcataaaaggggttcgcggatctcggagagccacagagcccgggccgcaggcacctcctcgccagctcttccgctcctctcacagccgccagacccgcctgctgagccccatggcccgcgctgctctctccgccgcccccagcaatccccggctcctgcgagtggcactgctgctcctgctcctggtagccgctggccggcgcgcagcaggtgggtaccggcgccctggggtccccgggccggacgcggctggggtaggcacccagcgccgacagcctcgctcagtcagtgagtctcttcttccctaggagcgtccgtggccactgaactgcgctgccagtgcttgcagaccctgcagggaattcaccccaagaacatccaaagtgtgaacgtgaagtcccccggaccccactgcgcccaaaccgaagtcatgtaagtcccgccccgcgctgcctctgccaccgccggggtcccagaccctcctgctgccccaaccctgtccccagcccgacctcctgcctcacgagattcccttccctctgcagagccacactcaagaatgggcggaaagcttgcctcaatcctgcatcccccatagttaagaaaatcatcgaaaagatgctgaacaggtgagttatggtttccatgtacacaggcgactggagccgttggtcagaaatactggcatgtgccccctaaaaataaaatcaggaaaacccaggggttagttgaaggactagaaattgggattattgttttcacaattaaggtttcctttacgataattactgctctggtgccagaggatattcccaatgcctggcgtccccaccctggttcttccttcgttccaatgaatgtaggtaaaactgccttcatttgaggcccagtaggacaaacagcaacaggttctggctgtttttaatccaatagtacagtggagaccaccgccccaccccacccccattcctaaaagagcatcccaagcttagaggtccctgccacacagcacagctgtcataggcagtagccacttggttgccaggctggggaaactgcattcggagaactctagaggctggaggagcagggcaggagaagagtgttgtgcaatcagctttcccgagcacctactcagggcacccattttctcattgcagtgacaaatccaactgaccagaagggaggaggaagctcactggtggctgttcctgaaggaggccctgcccttataggaacagaagaggaaagagagacacagctgcagaggccacctggattgtgcctaatgtgtttgagcatcgcttaggagaagtcttctatttatttatttattcattagttttgaagattctatgttaatattttaggtgtaaaataattaagggtatgattaactctacctgcacactgtcctattatattcattctttttgaaatgtcaaccccaagttagttcaatctggattcatatttaatttgaaggtagaatgttttcaaatgttctccagtcattatgttaatatttctgaggagcctgcaacatgccagccactgtgatagaggctggcggatccaagcaaatggccaatgagatcattgtgaaggcaggggaatgtatgtgcacatctgttttgtaactgtttagatgaatgtcagttgttatttattgaaatgatttcacagtgtgtggtcaacatttctcatgttgaaactttaagaactaaaatgttctaaatatcccttggacattttatgtctttcttgtaaggcatactgccttgtttaatggtagttttacagtgtttctggcttagaacaaaggggcttaattattgatgttttcatagagaatataaaaataaagcacttatag

SEQ ID NO: 454 - DNA, 458 bp, Homo sapiens
tttttttctataagtgctttatttttatattctctatgaaaacatcaataattaagcccctttgttctaagccagaaacactgtaaaactaccattaaacaaggcagtatgcttacaagaaagacataaaatgtccaagggatatttagaacattttagttcttaaagtttcaacatgagaaatgttgaccacacactgtgaaatcatttcaataaataacaactgacattcatctaaacagttacaaaacagatgtgcacatacattcccctgccttcacaatgatctcattggccatttgcttggatccgccagcctctatcacagtggctggcatgttgcaggctcctcagaaatattaacataatgactggagaacatttggaaaacattctaccttcaaattaaatatgaatccagattgaactaacttggggttgacatttcaaaaagaatg

SEQ ID NO: 455 - DNA, 3442 bp, Homo sapiens
agccggtgcgccgcagactagggcgcctcgggccagggagcgcggaggagccatggccaccgctaacggggccgtggaaaacgggcagccggacgggaagccgccggccctgccgcgccccatccgcaacctggaggtcaagttcaccaagatatttatcaacaatgaatggcacgaatccaagagtgggaaaaagtttgctacatgtaacccttcaactcgggagcaaatatgtgaagtggaagaaggagataagcccgacgtggacaaggctgtggaggctgcacaggttgccttccagaggggctcgccatggcgccggctggatgccctgagtcgtgggcggctgctgcaccagctggctgacctggtggagagggaccgcgccaccttggccgccctggagacgatggatacagggaagccatttcttcatgcttttttcatcgacctggagggctgtattagaaccctcagatactttgcagggtgggcagacaaaatccagggcaagaccatccccacagatgacaacgtcgtatgcttcaccaggcatgagcccattggtgtctgtggggccatcactccatggaacttccccctgctgatgctggtgtggaagctggcacccgccctctgctgtgggaacaccatggtcctgaagcctgcggagcagacacctctcaccgccctttatctcggctctctgatcaaagaggccgggttccctccaggagtggtgaacattgtgccaggattcgggcccacagtgggagcagcaatttcttctcaccctcagatcaacaagatcgccttcaccggctccacagaggttggaaaactggttaaagaagctgcgtcccggagcaatctgaagcgggtgacgctggagctgggggggaagaacccctgcatcgtgtgtgcggacgctgacttggacttggcagtggagtgtgcccatcagggagtgttcttcaaccaaggccagtgttgcacggcagcctccagggtgttcgtggaggagcaggtctactctgagtttgtcaggcggagcgtggagtatgccaagaaacggcccgtgggagaccccttcgatgtcaaaacagaacaggggcctcagattgatcaaaagcagttcgacaaaatcttagagctgatcgagagtgggaagaaggaaggggccaagctggaatgcgggggctcagccatggaagacaaggggctcttcatcaaacccactgtcttctcagaagtcacagacaacatgcggattgccaaagaggagattttcgggccagtgcaaccaatactgaagttcaaaagtatcgaagaagtgataaaaagagcgaatagcaccgactatggactcacagcagccgtgttcacaaaaaatctcgacaaagccctgaagttggcttctgccttagagtctggaacggtctggatcaactgctacaacgccctctatgcacaggctccatttggtggctttaaaatgtcaggaaatggcagagaactaggtgaatacgctttggccgaatacacagaagtgaaaactgtcaccatcaaacttggcgacaagaacccctgaaggaaaggcggggctccttcctcaaacatcggacggcggaatgtggcagatgaaatgtgctggaggaaaaaaatgacatttctgaccttcccgggacacattcttctggaggctttacatctactggagttgaatgattgctgttttcctctcactctcctgtttattcaccagactggggatgcctataggttgtctgtgaaatcgcagtcctgcctggggagggagctgttggccatttctgtgtttccctttaaaccagatcctggagacagtgagatactcagggcgttgttaacagggagtggtatttgaagtgtccagcagttgcttgaaatgctttgccgaatctgactccagtaagaatgtgggaaaaccccctgtgtgttctgcaagcagggctcttgcaccagcggtctcctcagggtggacctgcttacagagcaagccacgcctctttccgaggtgaaggtgggaccattccttgggaaaggattcacagtaaggttttttggtttttgttttttgttttcttgtttttaaaaaaaggatttcacagtgagaaagttttggttagtgcataccgtggaagggcgccagggtctttgtggattgcatgttgacattgaccgtgagattcggcttcaaaccaatactgcctttggaatatgacagaatcaatagcccagagagcttagtcaaagacgatatcacggtctaccttaaccaaggcactttcttaagcagaaaatattgttgaggttacctttgctgctaaagatccaatcttctaacgccacaacagcatagcaaatcctaggataattcacctcctcatttgacaaatcagagctgtaattcactttaacaaattacgcatttctatcacgttcactaacagcttatgataagtctgtgtagtcttccttttctccagttctgttacccaatttagattagtaaagcgtacacaactggaaagactgctgtaataacacagccttgttatttttaagtcctattttgatattaatttctgattagttagtaaataacacctggattctatggaggacctcggtcttcatccaagtggcctgagtatttcactggcaggttgtgaatttttcttttcctctttgggaatccaaatgatgatgtgcaatttcatgttttaacttgggaaactgaaagtgttcccatatagcttcaaaaacaaaaacaaatgtgttatccgacggatacttttatggttactaactagtactttcctaattgggaaagtagtgcttaagtttgcaaattaagttggggagggcaataataaaatgagggcccgtaacagaaccagtgtgtgtataacgaaaaccatgtataaaatgggcctatcacccttgtcagagatataaattaccacatttggcttcccttcatcagctaacacttatcacttatactaccaataacttgttaaatcaggatttggcttcatacactgaattttcagtattttatctcaagtagatatagacactaaccttgatagtgatacgttagagggttcctattcttccattgtacgataatgtctttaatatgaaatgctacattatttataattggtagagttattgtatctttttatagttgtaagtacacagaggtggtatatttaaacttctgtaatatactgtatttagaaatggaaatatatatagtgttaggtttcacttcttttaaggtttacccctgtggtgtggtttaaaaatctataggcctgggaattccgatcctagctgcagatcgcatcccacaatgcgagaatgataaaataaaattggatatttgaga

SEQ ID NO: 456 - DNA, 621 bp, Homo sapiens
  misc_feature (1)..(621): "n" represents an unknown nucleotide
tctcaaatatccaattttattttatcattctcgcattgtgggatgcgatctgcagctaggatcggaattcccaggcctatagatttttaaaccacaccacaggggtaaaccttaaaagaagtgaaacctaacactatatatatttccatttctaaatacagtatattacagaagtttaaatataccacctctgtgtacttacaactataaaaagatacaataactctaccaattataaataatgtagcatttcatattaaagacattatcgtacaatggaagaataggaaccctctaacgtatcactatcaaggttagtgtctatatctacttgagataaaatactgaaaattcagtgtatgaagccaaatcctggatttaacaagttattggtagtataagtgataagtgttagctgatgaagggaaggcaaatgtggtaatttatctctgacagggtgataggcccattttatacatggttttcgttatacacacactggttctgttacgggcccncattttattattgncctccccaacttaatttgcaacttaagcccactttccccattaggaagtctagttaggtaccntaaagtatccgtcggntacacattgt

SEQ ID NO: 457 - DNA, 192 bp, Homo sapiens
cgccagggtctttgtggattgcatgttgacattgaccgtgagattcggcttcaaaccaatactgcctttggaatatgacagaatcaatagcccagagagcttagtcaaagacgatatcacggtctaccttaaccaaggcactttcttaagcagaaaatattgttgaggttacctttgctgctaaagatccaa

SEQ ID NO: 458 - DNA, 1970 bp, Homo sapiens
atattggagtagcaagaggctgggaagccatcacttaccttgcactgagaaagaagacaaaggccagtatgcacagctttcctccactgctgctgctgctgttctggggtgtggtgtctcacagcttcccagcgactctagaaacacaagagcaagatgtggacttagtccagaaatacctggaaaaatactacaacctgaagaatgatgggaggcaagttgaaaagcggagaaatagtggcccagtggttgaaaaattgaagcaaatgcaggaattctttgggctgaaagtgactgggaaaccagatgctgaaaccctgaaggtgatgaagcagcccagatgtggagtgcctgatgtggctcagtttgtcctcactgaggggaaccctcgctgggagcaaacacatctgacctacaggattgaaaattacacgccagatttgccaagagcagatgtggaccatgccattgagaaagccttccaactctggagtaatgtcacacctctgacattcaccaaggtctctgagggtcaagcagacatcatgatatcttttgtcaggggagatcatcgggacaactctccttttgatggacctggaggaaatcttgctcatgcttttcaaccaggcccaggtattggaggggatgctcattttgatgaagatgaaaggtggaccaacaatttcagagagtacaacttacatcgtgttgcggctcatgaactcggccattctcttggactctcccattctactgatatcggggctttgatgtaccctagctacaccttcagtggtgatgttcagctagctcaggatgacattgatggcatccaagccatatatggacgttcccaaaatcctgtccagcccatcggcccacaaaccccaaaagcatgtgacagtaagctaacctttgatgctataactacgattcggggagaagtgatgttctttaaagacagattctacatgcgcacaaatcccttctacccggaagttgagctcaatttcatttctgttttctggccacaactgccaaatgggcttgaagctgcttacgaatttgccgacagagatgaagtccggtttttcaaagggaataagtactgggctgttcagggacagaatgtgctacacggataccccaaggacatctacagctcctttggcttccctagaactgtgaagcatatcgatgctgctctttctgaggaaaacactggaaaaacctacttctttgttgctaacaaatactggaggtatgatgaatataaacgatctatggatccaggttatcccaaaatgatagcacatgactttcctggaattggccacaaagttgatgcagttttcatgaaagatggatttttctatttctttcatggaacaagacaatacaaatttgatcctaaaacgaagagaattttgactctccagaaagctaatagctggttcaactgcaggaaaaattgaacattactaatttgaatggaaaacacatggtgtgagtccaaagaaggtgttttcctgaagaactgtctattttctcagtcatttttaacctctagagtcactgatacacagaatataatcttatttatacctcagtttgcatatttttttactatttagaatgtagccctttttgtactgatataatttagttccacaaatggtgggtacaaaaagtcaagtttgtggcttatggattcatataggccagagttgcaaagatcttttccagagtatgcaactctgacgttgatcccagagagcagcttcagtgacaaacatatcctttcaagacagaaagagacaggagacatgagtctttgccggaggaaaagcagctcaagaacacatgtgcagtcactggtgtcaccctggataggcaagggataactcttctaacacaaaataagtgttttatgtttggaataaagtcaaccttgtttctactgtttt

SEQ ID NO: 459 - DNA, 411 bp, Homo sapiens
  misc_feature (1)..(411): "n" represents an unknown nucleotide
atnaaacagtagaaacaaggttgactttattccaaacataaaacacttattttgtgttagaagagttatcccttgcctatccagggtgacaccagtgactgcacatgtgttcttgagctgcttttcctccggcaaagactcatgtctcctgtctctttctgtcttgaaaggatatgtttgtcactgaagctgctctctgggatcaacgtcagagttgcatactctggaaaagatctttgcaactctggcctatatgaatccataagccacaaacttgactttttgtacccaccatttgtgganctaaattatatcagtacaaaaagggctacattctaaatagtnaaanaatatgcaaactgaggtataaatnagnttatattctggggaatcagtgactctagaggttaa

SEQ ID NO: 460 - DNA, 482 bp, Homo sapiens
  misc_feature (1)..(482): "n" represents an unknown nucleotide
aagccatcacttaccttgcactgagaaagaagacaaaggccagtatgcacagctttcctccactgctgctgctgctgttctggggtgtggtgtctcacagcttcccagcgactctagaaacacaagagcaagatgtggacttagtcagaaatacctggaaaaatactacaacctgaagaatgatgggaggcaagttgaaaagcggagaaatagtggcccagtggttgaaaaattgaagcaaatgcaggaattctttgggctgaaagtgactgggaaaccagatgctgaaaccctgaaggtgatgaagcagcccagatgtggagtgcctgatgtggctcagtttgtcctcacttgaggggaacctcngcttgggagcaaacacatctgacctacaggattgaaaaattacacgccagatttgccaagagcagatgtggaccatgccattgagaaagccntccaactcctgggagtaatgtcac

SEQ ID NO: 461 - DNA, 3213 bp, Homo sapiens
agagactcaagatgattccctttttacccatgttttctctactattgctgcttattgttaaccctataaacgccaacaatcattatgacaagatcttggctcatagtcgtatcaggggtcgggaccaaggcccaaatgtctgtgcccttcaacagattttgggcaccaaaaagaaatacttcagcacttgtaagaactggtataaaaagtccatctgtggacagaaaacgactgttttatatgaatgttgccctggttatatgagaatggaaggaatgaaaggctgcccagcagttttgcccattgaccatgtttatggcactctgggcatcgtgggagccaccacaacgcagcgctattctgacgcctcaaaactgagggaggagatcgagggaaagggatccttcacttactttgcaccgagtaatgaggcttgggacaacttggattctgatatccgtagaggtttggagagcaacgtgaatgttgaattactgaatgctttacatagtcacatgattaataagagaatgttgaccaaggacttaaaaaatggcatgattattccttcaatgtataacaatttggggcttttcattaaccattatcctaatggggttgtcactgttaattgtgctcgaatcatccatgggaaccagattgcaacaaatggtgttgtccatgtcattgaccgtgtgcttacacaaattggtacctcaattcaagacttcattgaagcagaagatgacctttcatcttttagagcagctgccatcacatcggacatattggaggcccttggaagagacggtcacttcacactctttgctcccaccaatgaggcttttgagaaacttccacgaggtgtcctagaaaggttcatgggagacaaagtggcttccgaagctcttatgaagtaccacatcttaaatactctccagtgttctgagtctattatgggaggagcagtctttgagacgctggaaggaaatacaattgagataggatgtgacggtgacagtataacagtaaatggaatcaaaatggtgaacaaaaaggatattgtgacaaataatggtgtgatccatttgattgatcaggtcctaattcctgattctgccaaacaagttattgagctggctggaaaacagcaaaccaccttcacggatcttgtggcccaattaggcttggcatctgctctgaggccagatggagaatacactttgctggcacctgtgaataatgcattttctgatgatactctcagcatggttcagcgcctccttaaattaattctgcagaatcacatattgaaagtaaaagttggccttaatgagctttacaacgggcaaatactggaaaccatcggaggcaaacagctcagagtcttcgtatatcgtacagctgtctgcattgaaaattcatgcatggagaaagggagtaagcaagggagaaacggtgcgattcacatattccgcgagatcatcaagccagcagagaaatccctccatgaaaagttaaaacaagataagcgctttagcaccttcctcagcctacttgaagctgcagacttgaaagagctcctgacacaacctggagactggacattatttgtgccaaccaatgatgcttttaagggaatgactagtgaagaaaaagaaattctgatacgggacaaaaatgctcttcaaaacatcattctttatcacctgacaccaggagttttcattggaaaaggatttgaacctggtgttactaacattttaaagaccacacaaggaagcaaaatctttctgaaagaagtaaatgatacacttctggtgaatgaattgaaatcaaaagaatctgacatcatgacaacaaatggtgtaattcatgttgtagataaactcctctatccagcagacacacctgttggaaatgatcaactgctggaaatacttaataaattaatcaaatacatccaaattaagtttgttcgtggtagcaccttcaaagaaatccccgtgactgtctatacaactaaaattataaccaaagttgtggaaccaaaaattaaagtgattgaaggcagtcttcagcctattatcaaaactgaaggacccacactaacaaaagtcaaaattgaaggtgaacctgaattcagactgattaaagaaggtgaaacaataactgaagtgatccatggagagccaattattaaaaaatacaccaaaatcattgatggagtgcctgtggaaataactgaaaaagagacacgagaagaacgaatcattacaggtcctgaaataaaatacactaggatttctactggaggtggagaaacagaagaaactctgaagaaattgttacaagaagaggtcaccaaggtcaccaaattcattgaaggtggtgatggtcatttatttgaagatgaagaaattaaaagactgcttcagggagacacacccgtgaggaagttgcaagccaacaaaaaagttcaaggttctagaagacgattaagggaaggtcgttctcagtgaaaatccaaaaaccagaaaaaaatgtttatacaaccctaagtcaataacctgaccttagaaaattgtgagagccaagttgacttcaggaactgaaacatcagcacaaagaagcaatcatcaaataattctgaacacaaatttaatatttttttttctgaatgagaaacatgagggaaattgtggagttagcctcctgtggtaaaggaattgaagaaaatataacaccttacaccctttttcatcttgacattaaaagttctggctaactttggaatccattagagaaaaatccttgtcaccagattcattacaattcaaatcgaagagttgtgaactgttatcccattgaaaagaccgagccttgtatgtatgttatggatacataaaatgcacgcaagccattatctctccatgggaagctaagttataaaaataggtgcttggtgtacaaaactttttatatcaaaaggctttgcacatttctatatgagtgggtttactggtaaattatgttattttttacaactaattttgtactctcagaatgtttgtcatatgcttcttgcaatgcatattttttaatctcaaacgtttcaataaaaccatttttcagatataaagagaattacttcaaattgagtaattcagaaaaactcaagatttaagttaaaaagtggtttggacttgggaa

SEQ ID NO: 462 - DNA, 343 bp, Homo sapiens
ttcattcaatttcctttaatgagtacttgttacagtaaaagaggtataaagtcctgttcccaagtccaaaccactttttaacttaaatcttgagtttttctgaattactcaatttgaagtaattctctttatatctgaaaaatggttttattgaaacgtttgagattaaaaaatatgcattgcaagaagcatatgacaaacattctgagagtacaaaattagttgtaaaaaataacataatttaccagtaaacccactcatatagaaatgtgcaaagccttttgatataaaaagttttgtacaccaagcacctatttttataacttagcttcccatggagaga

SEQ ID NO: 463 - DNA, 3118 bp, Homo sapiens
ggggggggggggggggggagaggcttccctggctggtgcctgagcccggcgtccctcgccccccgccctccccgcatccctctcctccctcgcgcctggccctgtggctcttcctccctccctccttccccccccccccacccctcgcccgctgcctccctcggcccagccagctgtgccggcgtttgttggctgccctgcgcccggccctccagccagccttctgccggccccgccgcgatggaggtgccccagccggagcccgcgccaggctcggctctcagtccagcaggcgtgtgcggtggcgcccagcgtccgggccacctcccgggcctcctgctgggatctcatggcctcctggggtccccggtgcgggcggccgcttcctcgccggtcaccaccctcacccagaccatgcacgacctcgccgggctcggcagccgcagccgcctgacgcacctatccctgtctcgacgggcatccgaatcctccctgtcgtctgaatcctccgaatcttctgatgcaggtctctgcatggattcccccagccctatggacccccacatggcggagcagacgtttgaacaggccatccaggcagccagccggatcattcgaaacgagcagtttgccatcagacgcttccagtctatgccggtgaggctgctgggccacagccccgtgcttcggaacatcaccaactcccaggcgcccgacggccggaggaagagcgaggcgggcagtggagctgccagcagctctggggaagacaaggagaatgatggatttgtcttcaagatgccatggaagcccacacatcccagctccacccatgctctggcagagtgggccagccgcagggaagcctttgcccagagacccagctcggcccccgacctgatgtgtctcagtcctgaccggaagatggaagtggaggagctcagccccctggccctaggtcgcttctctctgacccctgcagagggggatactgaggaagatgatggatttgtggacatcctagagagtgacttaaaggatgatgatgcagttcccccaggcatggagagtctcattagtgccccactggtcaagaccttggaaaaggaagaggaaaaggacctcgtcatgtacagcaagtgccagcggctcttccgctctccgtccatgccctgcagcgtgatccggcccatcctcaagaggctggagcggccccaggacagggacacgcccgtgcagaataagcggaggcggagcgtgacccctcctgaggagcagcaggaggctgaggaacctaaagcccgcgtcctccgctcaaaatcactgtgtcacgatgagatcgagaacctcctggacagtgaccaccgagagctgattggagattactctaaggccttcctcctacagacagtagacggaaagcaccaagacctcaagtacatctcaccagaaacgatggtggccctattgacgggcaagttcagcaacatcgtggataagtttgtgattgtagactgcagatacccctatgaatatgaaggcgggcacatcaagactgcggtgaacttgcccctggaacgcgacgccgagagcttcctactgaagagccccatcgcgccctgtagcctggacaagagagtcatcctcattttccactgtgaattctcatctgagcgtgggccccgcatgtgccgtttcatcagggaacgagaccgtgctgtcaacgactaccccagcctctactaccctgagatgtatatcctgaaaggcggctacaaggagttcttccctcagcacccgaacttctgtgaaccccaggactaccggcccatgaaccacgaggccttcaaggatgagctaaagaccttccgcctcaagactcgcagctgggctggggagcggagccggcgggagctctgtgaccggctgcaggaccagtgaggggcctgcgccagtcctgctacctcccttgcctttcgaggcctgaagccagctgccctatgggcctgccgggctgagggcctgctggaggcctcaggtgctgtccatgggaaagatggtgtggtgtcctgcctgtctgccccagcccagattcccctgtgtcatcccatcattttccatatcctggtgccccccacccctggaagagcccagtctgttgagttagttaagttgggttaataccagcttaaaggcagtattttgtgtcctccaggagcttcttgtttccttgttagggttaacccttcatcttcctgtgtcctgaaacgctcctttgtgtgtgtgtcagctgaggctggggagagccgtggtccctgaggatgggtcagagctaaactccttcctggcctgagagtcagctctctgccctgtgtacttcccgggccagggctgcccctaatctctgtaggaaccgtggtatgtctgccatgttgcccctttctcttttcccctttcctgtcccaccatacgagcacctccagcctgaacagaagctcttactctttcctatttcagtgttacctgtgtgcttggtctgtttgactttacgcccatctcaggacacttccgtagactgtttaggttcccctgtcaaatatcagttacccactcggtcccagttttgttgccccagaaagggatgttattatccttgggggctcccagggcaagggttaaggcctgaatcatgagcctgctggaagcccagcccctactgctgtgaaccctggggcctgactgctcagaacttgctgctgtcttgttgcggatggatggaaggttggatggatgggtggatggccgtggatggccgtggatgcgcagtgccttgcatacccaaaccaggtgggagcgttttgttgagcatgacacctgcagcaggaatatatgtgtgcctatttgtgtggacaaaaatatttacacttagggtttggagctattcaagaggaaatgtcacagaagcagctaaaccaaggactgagcaccctctggattctgaatctcaagatgggggcagggctgtgcttgaaggccctgctgagtcatctgttagggccttggttcaataaagcactgagcaagttgagaaaaaaaaaaaaaaaaaaaaaaaaaaaaa

SEQ ID NO: 464 - DNA, 438 bp, Homo sapiens
  misc_feature (1)..(438): "n" represents an unknown nucleotide
cgccggtcaccaccctcacccagnaccatgcacgacctcgccgggctcggagncgnaaaccccaaagagtcaggtagggaccctgctcttccgcagccgcagccgcctgacgcacctatccctgtctcgacgggcatccgaatcctccctgtcgtctgaatcctccgaatcttctgatgcaggtctctgcatgggattcccccagccctatggacccccacatgggcgganagnacgtttgaacaggccatccaggcagccagccgnatcattcgaaacgagcagtttgccatcagacgcttccagtctatgccggtgaggtgactgggccacagcccgntgcttcggaacatcaccaactcccagggngcccgacggccggaggaaggagcnaggcgnggcagtgggagctgcagcagctctgggggaagacaagga

SEQ ID NO: 465 - DNA, 444 bp, Homo sapiens
  misc_feature (1)..(444): "n" represents an unknown nucleotide
ggctggggtagtcgttgacagcacggtctcgttccctgatgaaacggcacatgcggggcccacgctcagatgagaattcacagtggaaaatgaggatgactctcttgtccaggctacagggcgcgatggggctcttcagtaggaagctctcggcgtcgcgttccaggggcaagttcaccgcagtcttgatgtgcccgccttcatattcataggggtatctgcagtctacaatcacaaacttatccacgatgttgctgaacttgcccgtcaatagggccaccatcgtttctggtgagatgtacttgaggtcttggtgctttccgtctactgtctgtaggaggaaggccttagagtaatctccaatcagctctcggtggtcactgttccagggaggttnttcgatcttcatcgtgaacacagtggatttttgagcggaaggacgcg

SEQ ID NO: 466 - DNA, 8368 bp, Homo sapiens
gcgatccgggcgccaccccgcggtcatcggtcaccggtcgctctcaggaacagcagcgcaacctctgctccctgcctcgcctcccgcgcgcctaggtgcctgcgactttaattaaagggccgtcccctcgccgaggctgcagcaccgcccccccggcttctcgcgcctcaaaatgagtagctcccactctcgggcgggccagagcgcagcaggcgcggctccgggcggcggcgtcgacacgcgggacgccgagatgccggccaccgagaaggacctggcggaggacgcgccgtggaagaagatccagcagaacactttcacgcgctggtgcaacgagcacctgaagtgcgtgagcaagcgcatcgccaacctgcagacggacctgagcgacgggctgcggcttatcgcgctgttggaggtgctcagccagaagaagatgcaccgcaagcacaaccagcggcccactttccgccaaatgcagcttgagaacgtgtcggtggcgctcgagttcctggaccgcgagagcatcaaactggtgtccatcgacagcaaggccatcgtggacgggaacctgaagctgatcctgggcctcatctggaccctgatcctgcactactccatctccatgcccatgtgggacgaggaggaggatgaggaggccaagaagcagacccccaagcagaggctcctgggctggatccagaacaagctgccgcagctgcccatcaccaacttcagccgggactggcagagcggccgggccctgggcgccctggtggacagctgtgccccgggcctgtgtcctgactgggactcttgggacgccagcaagcccgttaccaatgcgcgagaggccatgcagcaggcggatgactggctgggcatcccccaggtgatcacccccgaggagattgtggaccccaacgtggacgagcactctgtcatgacctacctgtcccagttccccaaggccaagctgaagccaggggctcccttgcgccccaaactgaacccgaagaaagcccgtgcctacgggccaggcatcgagcccacaggcaacatggtgaagaagcgggcagagttcactgtggagaccagaagtgctggccagggagaggtgctggtgtacgtggaggacccggccggacaccaggaggaggcaaaagtgaccgccaataacgacaagaaccgcaccttctccgtctggtacgtccccgaggtgacggggactcataaggttactgtgctctttgctggccagcacatcgccaagagccccttcgaggtgtacgtggataagtcacagggtgacgccagcaaagtgacagcccaaggtcccggcctggagcccagtggcaacatcgccaacaagaccacctactttgagatctttacggcaggagctggcacgggcgaggtcgaggttgtgatccaggaccccatgggacagaagggcacggtagagcctcagctggaggcccggggcgacagcacataccgctgcagctaccagcccaccatggagggcgtccacaccgtgcacgtcacgtttgccggcgtgcccatccctcgcagcccctacactgtcactgttggccaagcctgtaacccgagtgcctgccgggcggttggccggggcctccagcccaagggtgtgcgggtgaaggagacagctgacttcaaggtgtacacaaagggcgctggcagtggggagctgaaggtcaccgtgaagggccccaagggagaggagcgcgtgaagcagaaggacctgggggatggcgtgtatggcttcgagtattaccccatggtccctggaacctatatcgtcaccatcacgtggggtggtcagaacatcgggcgcagtcccttcgaagtgaaggtgggcaccgagtgtggcaatcagaaggtacgggcctggggccctgggctggagggcggcgtcgttggcaagtcagcagactttgtggtggaggctatcggggacgacgtgggcacgctgggcttctcggtggaagggccatcgcaggctaagatcgaatgtgacgacaagggcgacggctcctgtgatgtgcgctactggccgcaggaggctggcgagtatgccgttcacgtgctgtgcaacagcgaagacatccgcctcagccccttcatggctgacatccgtgacgcgccccaggacttccacccagacagggtgaaggcacgtgggcctggattggagaagacaggtgtggccgtcaacaagccagcagagttcacagtggatgccaagcacggtggcaaggccccacttcgggtccaagtccaggacaatgaaggctgccctgtggaggcgttggtcaaggacaacggcaatggcacttacagctgctcctacgtgcccaggaagccggtgaagcacacagccatggtgtcctggggaggcgtcagcatccccaacagccccttcagggtgaatgtgggagctggcagccaccccaacaaggtcaaagtatacggccccggagtagccaagacagggctcaaggcccacgagcccacctacttcactgtggactgcgccgaggctggccagggggacgtcagcatcggcatcaagtgtgcccctggagtggtaggccccgccgaagctgacatcgacttcgacatcatccgcaatgacaatgacaccttcacggtcaagtacacgccccggggggctggcagctacaccattatggtcctctttgctgaccaggccacgcccaccagccccatccgagtcaaggtggagccctctcatgacgccagtaaggtgaaggccgagggccctggcctcagtcgcactggtgtcgagcttggcaagcccacccacttcacagtaaatgccaaagctgctggcaaaggcaagctggacgtccagttctcaggactcaccaagggggatgcagtgcgagatgtggacatcatcgaccaccatgacaacacctacacagtcaagtacacgcctgtccagcagggtccagtaggcgtcaatgtcacttatggaggggatcccatccctaagagccctttctcagtggcagtatctccaagcctggacctcagcaagatcaaggtgtctggcctgggagagaaggtggacgttggcaaagaccaggagttcacagtcaaatcaaagggtgctggtggtcaaggcaaagtggcatccaagattgtgggcccctcgggtgcagcggtgccctgcaaggtggagccaggcctgggggctgacaacagtgtggtgcgcttcctgccccgtgaggaagggccctatgaggtggaggtgacctatgacggcgtgcccgtgcctggcagcccctttcctctggaagctgtggcccccaccaagcctagcaaggtgaaggcgtttgggccggggctgcagggaggcagtgcgggctcccccgcccgcttcaccatcgacaccaagggcgccggcacaggtggcctgggcctgacggtggagggcccctgtgaggcgcagctcgagtgcttggacaatggggatggcacatgttccgtgtcctacgtgcccaccgagcccggggactacaacatcaacatcctcttcgctgacacccacatccctggctccccattcaaggcccacgtggttccctgctttgacgcatccaaagtcaagtgctcaggccccgggctggagcgggccaccgctggggaggtgggccaattccaagtggactgctcgagcgcgggcagcgcggagctgaccattgagatctgctcggaggcggggcttccggccgaggtgtacatccaggaccacggtgatggcacgcacaccattacctacattcccctctgccccggggcctacaccgtcaccatcaagtacggcggccagcccgtgcccaacttccccagcaagctgcaggtggaacctgcggtggacacttccggtgtccagtgctatgggcctggtattgagggccagggtgtcttccgtgaggccaccactgagttcagtgtggacgcccgggctctgacacagaccggagggccgcacgtcaaggcccgtgtggccaacccctcaggcaacctgacggagacctacgttcaggaccgtggcgatggcatgtacaaagtggagtacacgccttacgaggagggactgcactccgtggacgtgacctatgacggcagtcccgtgcccagcagccccttccaggtgcccgtgaccgagggctgcgacccctcccgggtgcgtgtccacgggccaggcatccaaagtggcaccaccaacaagcccaacaagttcactgtggagaccaggggagctggcacgggcggcctgggcctggctgtagagggcccctccgaggccaagatgtcctgcatggataacaaggacggcagctgctcggtcgagtacatcccttatgaggctggcacctacagcctcaacgtcacctatggtggccatcaagtgccaggcagtcctttcaaggtccctgtgcatgatgtgacagatgcgtccaaggtcaagtgctctgggcccggcctgagcccaggcatggttcgtgccaacctccctcagtccttccaggtggacacaagcaaggctggtgtggccccattgcaggtcaaagtgcaagggcccaaaggcctggtggagccagtggacgtggtagacaacgctgatggcacccagaccgtcaattatgtgcccagccgagaagggccctacagcatctcagtactgtatggagatgaagaggtaccccggagccccttcaaggtcaaggtgctgcctactcatgatgccagcaaggtgaaggccagtggccccgggctcaacaccactggcgtgcctgccagcctgcccgtggagttcaccatcgatgcaaaggacgccggggagggcctgctggctgtccagatcacggatcccgaaggcaagccgaagaagacacacatccaagacaaccatgacggcacgtatacagtggcctacgtgccagacgtgacaggtcgctacaccatcctcatcaagtacggtggtgacgagatccccttctccccgtaccgcgtgcgtgccgtgcccaccggggacgccagcaagtgcactgtcacagtgtcaatcggaggtcacgggctaggtgctggcatcggccccaccattcagattggggaggagacggtgatcactgtggacactaaggcggcaggcaaaggcaaagtgacgtgcaccgtgtgcacgcctgatggctcagaggtggatgtggacgtggtggagaatgaggacggcactttcgacatcttctacacggccccccagccgggcaaatacgtcatctgtgtgcgctttggtggcgagcacgtgcccaacagccccttccaagtgacggctctggctggggaccagccctcggtgcagccccctctacggtctcagcagctggccccacagtacacctacgcccagggcggccagcagacttgggccccggagaggcccctggtgggtgtcaatgggctggatgtgaccagcctgaggccctttgaccttgtcatccccttcaccatcaagaagggcgagatcacaggggaggttcggatgccctcaggcaaggtggcgcagcccaccatcactgacaacaaagacggcaccgtgaccgtgcggtatgcacccagcgaggctggcctgcacgagatggacatccgctatgacaacatgcacatcccaggaagccccttgcagttctatgtggattacgtcaactgtggccatgtcactgcctatgggcctggcctcacccatggagtagtgaacaagcctgccaccttcaccgtcaacaccaaggatgcaggagaggggggcctgtctctggccattgagggcccgtccaaagcagaaatcagctgcactgacaaccaggatgggacatgcagcgtgtcctacctgcctgtgctgccgggggactacagcattctagtcaagtacaatgaacagcacgtcccaggcagccccttcactgctcgggtcacaggtgacgactccatgcgtatgtcccacctaaaggtcggctctgctgccgacatccccatcaacatctcagagacggatctcagcctgctgacggccactgtggtcccgccctcgggccgggaggagccctgtttgctgaagcggctgcgtaatggccacgtggggatttcattcgtgcccaaggagacgggggagcacctggtgcatgtgaagaaaaatggccagcacgtggccagcagccccatcccggtggtgatcagccagtcggaaattggggatgccagtcgtgttcgggtctctggtcagggccttcacgaaggccacacctttgagcctgcagagtttatcattgatacccgcgatgcaggctatggtgggctcagcctgtccattgagggccccagcaaggtggacatcaacacagaggacctggaggacgggacgtgcagggtcacctactgccccacagagccaggcaactacatcatcaacatcaagtttgccgaccagcacgtgcctggcagccccttctctgtgaaggtgacaggcgagggccgggtgaaagagagcatcacccgcaggcgtcgggctccttcagtggccaacgttggtagtcattgtgacctcagcctgaaaatccctgaaattagcatccaggatatgacagcccaggtgaccagcccatcgggcaagacccatgaggccgagatcgtggaaggggagaaccacacctactgcatccgctttgttcccgctgagatgggcacacacacagtcagcgtcaagtacaagggccagcacgtgcctgggagccccttccagttcaccgtggggcccctaggggaagggggagcccacaaggtccgagctgggggccctggcctggagagagctgaagctggagtgccagccgaattcagtatctggacccgggaagctggtgctggaggcctggccattgctgtcgagggccccagcaaggctgagatctcttttgaggaccgcaaggacggctcctgtggtgtggcttatgtggtccaggagccaggtgactacgaagtctcagtcaagttcaacgaggaacacattcccgacagccccttcgtggtgcctgtggcttctccgtctggcgacgcccgccgcctcactgtttctagccttcaggagtcagggctaaaggtcaaccagccagcctcttttgcagtcagcctgaacggggccaagggggcgatcgatgccaaggtgcacagcccctcaggagccctggaggagtgctatgtcacagaaattgaccaagataagtatgctgtgcgcttcatccctcgggagaatggcgtttacctgattgacgtcaagttcaacggtacccacatccctggaagccccttcaagatccgagttggggagcctgggcatggaggggacccaggcttggtgtctgcttacggagcaggtctggaaggcggtgtcacagggaacccagctgagttcgtcgtgaacacgagcaatgcgggagctggtgccctgtcggtgaccattgacggcccctccaaggtgaagatggattgccaggagtgccctgagggctaccgcgtcacctatacccccatggcacctggcagctacctcatctccatcaagtacggcggcccctaccacattgggggcagccccttcaaggccaaagtcacaggcccccgtctcgtcagcaaccacagcctccacgagacatcatcagtgtttgtagactctctgaccaaggccacctgtgccccccagcatggggccccgggtcctgggcctgctgacgccagcaaggtggtggccaagggcctggggctgagcaaggcctacgtaggccagaagagcagcttcacagtagactgcagcaaagcaggcaacaacatgctgctggtgggggttcatggcccaaggaccccctgcgaggagatcctggtgaagcacgtgggcagccggctctacagcgtgtcctacctgctcaaggacaagggggagtacacactggtggtcaaatgggggcacgagcacatcccaggcagcccctaccgcgttgtggtgccctgagtctggggcccgtgccagccggcagcccccaagcctgccccgctacccaagcagccccgccctcttcccctcaaccccggcccaggccgccctggccgcccgcctgtcactgcagctgcccctgccctgtgccgtgctgcgctcacctgcctccccagccagccgctgacctctcggctttcacttgggcagagggagccatttggtggcgctgcttgtcttctttggttctgggaggggtgagggatgggg

SEQ ID NO: 467 - DNA, 329 bp, Homo sapiens
  misc_feature (1)..(329): "n" represents an unknown nucleotide
agaatggaagcaaaactttattcctcttggctggagaagagaactagtgggtggttgtgtacaggacccccatccctcacccctcccagaaccaaagaagacaagcancnccaccaaatggctccctctgcccaagtgaaagccgagaggtcagcggctggctaggngaggcaggtgagcgcacacaggcacagggcaggggcgnctgcagtgacaggcgggcggccagggcggcctgtngcccggggttgaanggnaagaagggcggggctgcttgggtagcggggcaggcttgntgggctgccggctcgtnacagggccccagactc

SEQ ID NO: 468 - DNA, 405 bp, Homo sapiens
  misc_feature (1)..(405): "n" represents an unknown nucleotide
ggcttctccgtctggcgacgccgccgcctcactgtttctanccttcggnagtcagggctaaaggtcaaccagccagcctcttntgcagtcagcctgaacggggccaagggggcgatcgatgccaaggtgcacagcccctcaggagccctngaggagtgctatgtcacagaaattgaccaagataagtatgctgtgcgcttcatccctcgggagaatggcgtttacctgattgacgtcaagttcaacggcacccacatccctggaagccccttcaagatncgagttggggagcctgggcagtggatggggacccacggcttgntgtctgcttacaggagcaggtcttggaaggcggtagtcacagnggaacccagctagagttcntcgtgaacacnagcaatncgg

SEQ ID NO: 469 - DNA, 386 bp, Homo sapiens
atttgctagtcctttttattctcaaatatgttaaaagcacatgattatattgtcttatgttgtttcagttatgatcctcttctgaaatcaggaatacgaccccaagaaatgagtgagtcatatttgcttttatatcttatgcattgcaagaattcagtctcacaaacagttgaaccataaattaaaaatggtagactcacatttgaatagcagctagttatatataaaaaaatccaaattttttaaaaagtgacttgtattaataaaaactggtgaataaatcaccaatgatttgtttcctcatgctgtcatattattcttcagatacaaccataaaggcaaataagccataaagacaaacaagatgacatattaagaatgtttaa

SEQ ID NO: 470 - DNA, 485 bp, Homo sapiens
cagaacctgtgatgctttcacctatactggctgtggagggaatgacaataactttgttagcagggaggattgcaaacgtgcatgtgcaaaagctttgaaaaagaaaaagaagatgccaaagcttcgctttgcacattagaatccggaaaattcggaagaagcaattttaaacattcttaatatgtcatcttgtttgtctttatggcttatttgcctttatggttgtatctgaagaataatatgacagcatgaggaaacaaatcattggtgatttattcaccagtttttattaatacaagtcactttttaaaaaatttggatttttttatatataactagctgctattcaaatgtgagtctaccatttttaatttatggttcaactgtttgtgagactgaattcttgcaatgcataagatataaaagcaaatatgactcactcatttcttggggtcgtattcctgatttcagaagaggatcataac

SEQ ID NO: 471 - DNA, 3877 bp, Homo sapiens
gccagattagcggacgcgtgcccgcggttgcaacgggatcccgggcgctgcagcttgggaggcggctctccccaggcggcgtccgcggagacaaccatccgtgaaccccaggtcccggcgcgccggctcgccgcgcaccaggggccggcggacagaagagcggccgagcggctcgaggctgggggacccggcgcggccgcgcgctgccgggcgggaggctggggggccggggcggggccgtgccccggagcgggtcggaggccggggccggggccgggggacggcggctccccgcgcggctccagcggctcggggatcccggccgggccccgcaggaccatggcagccgggagcatcaccacgctgcccgccttgcccgaggatggcggcagcggcgccttcccgcccggccacttcaaggaccccaagcggctgtactgcaaaaacgggggcttcttcctgcgcatccaccccgacggccgagttgacggggtccgggagaagagcgaccctcacatcaagctacaacttcaagcagaagagagaggagttgtgtctatcaaaggagtgtgtgctaaccgttacctggctatgaaggaagatggaagattactggcttctaaatgtgttacggatgagtgtttcttttttgaacgattggaatctaataactacaatacttaccggtcaaggaaatacaccagttggtatgtggcactgaaacgaactgggcagtataaacttggatccaaaacaggacctgggcagaaagctatactttttcttccaatgtctgctaagagctgattttaatggccacatctaatctcatttcacatgaaagaagaagtatattttagaaatttgttaatgagagtaaaagaaaataaatgtgtaaagctcagtttggataattggtcaaacaattttttatccagtagtaaaatatgtaaccattgtcccagtaaagaaaaataacaaaagttgtaaaatgtatattctcccttttatattgcatctgctgttacccagtgaagcttacctagagcaatgatctttttcacgcatttgctttattcgaaaagaggcttttaaaatgtgcatgtttagaaacaaaatttcttcatggaaatcatcatatacattagaaaatcacagtcagatgtttaatcaatccaaaatgtccactatttcttatgtcattcgttagtctacatgtttctaaacatataaatgtgaatttaatcaattcctttcatagttttataattctctggcagttccttatgatagagtttataaaacagtcctgtgtaaactgctggaagttcttccacagtcaggtcaattttgtcaaacccttctctgtacccatacagcagcagcctagcaactctgctggtgatgggagttgtattttcagtcttcgccaggtcattgagatccatccactcacatcttaagcattcttcctggcaaaaatttatggtgaatgaatatggctttaggcggcagatgatatacatatctgacttcccaaaagctccaggatttgtgtgctgttgccgaatactcaggacggacctgaattctgattttataccagtctcttcaaaaccttctcgaaccgctgtgtctcctacgtaaaaaaagagatgtacaaatcaataataattacacttttagaaactgtatcatcaaagattttcagttaaagtagcattatgtaaaggctcaaaacattaccctaacaaagtaaagttttcaatacaaattctttgccttgtggatatcaagaaatcccaaaatattttcttaccactgtaaattcaagaagcttttgaaatgctgaatatttctttggctgctacttggaggcttatctacctgtacatttttggggtcagctctttttaacttcttgctgctgtttttcccaaaaggtaaaaatatagattgaaaagttaaaacattttgcatggctgcagttcctttgtttcttgagataagattccaaagaacttagatttatttcttcaacaccgaaatgctggaggtgtttgatcagttttcaagaaacttggaatataaataattttataattcaacaaaggttttcacattttataaggttgatttttcaattaaatgcaaatttatgtggcaggatttttattgccattaacatatttttgtggctgctttttctacacatccagatggtccctctaactgggctttctctaattttgtgatgttctgtcattgtctcccaaagtatttaggagaagccctttaaaaagctgccttcctctaccactttgctgaaagcttcacaattgtcacagacaaagatttttgttccaatactcgttttgcctctattttacttgtttgtcaaatagtaaatgatatttgcccttgcagtaattctactggtgaaaaacatgcaaagaagaggaagtcacagaaacatgtctcaattcccatgtgctgtgactgtagactgtcttaccatagactgtcttacccatcccctggatatgctcttgttttttccctctaatagctatggaaagatgcatagaaagagtataatgttttaaaacataaggcattcgtctgccatttttcaattacatgctgacttcccttacaattgagatttgcccataggttaaacatggttagaaacaactgaaagcataaaagaaaaatctaggccgggtgcagtggctcatgcccatattccctgcactttgggaggccaaagcaggaggatcgcttgagcccaggagttcaagaccaacctggtgaaaccccgtctctacaaaaaaacacaaaaaatagccaggcatggtggcgtgtacatgtggtctcagatacttgggaggctgaggtgggagggttgatcacttgaggctgagaggtcaaggttacagtgagccataatcgtgccactgcagtccagcctaggcaacagagtgagactttgtctcaaaaaaagagaaattttccttaataagaaaagtaatttttactctgatgtgcaatacatttgttattaaatttattatttaagatggtagcactagtcttaaattgtataaaatatcccctaacatgtttaaatgtccatttttattcattatgctttgaaaaataattatggggaaatacatgtttgttattaaatttattattaaagatagtagcactagtcttaaatttgatataacatctcctaacttgtttaaatgtccatttttattctttatgtttgaaaataaattatggggatcctatttagctcttagtaccactaatcaaaagttcggcatgtagctcatgatctatgctgtttctatgtcgtggaagcaccggatgggggtagtgagcaaatctgccctgctcagcagtcaccatagcagctgactgaaaatcagcactgcctgagtagttttgatcagtttaacttgaatcactaactgactgaaaattgaatgggcaaataagtgcttttgtctccagagtatgcgggagacccttccacctcaagatggatatttcttccccaaggatttcaagatgaattgaaatttttaatcaagatagtgtgctttattctgttgtattttttattattttaatatactgtaagccaaactgaaataacatttgctgttttataggtttgaagacataggaaaaactaagaggttttatttttgtttttgctgatgaagagatatgtttaaatactgttgtattgttttgtttagttacaggacaataatgaaatggagtttatatttgttatttctattttgttatatttaataatagaattagattgaaataaaatataatgggaaat

SEQ ID NO: 472 - DNA, 436 bp, Homo sapiens
  misc_feature (1)..(436): "n" represents an unknown nucleotide
ttttttttgacaagaaaacacaaactaatcaattttattcatactactcatgaaaacgcaattacatttttacataaaatcattaacacatacaatagaaataataaagagtaatacatctgattagnaatacaatataggnaatagattttaaaatagcatattttagtgatgaaatttatattttctacttatttatagcagcatctgtaaggttcttctatctgttcatagttaactagcagcaaantattttaaattacagganttcagtaggatgtttccctcccaatgtttcattcatacaggatggtatcacggttaaccccaaccaaaacccccttatattnccctgagggggaaagggtggggggcnaaggnttttccatccgggttccccnggcttcccccccanggaaagggnggggaccggggg

SEQ ID NO: 473 - DNA, 355 bp, Homo sapiens
  misc_feature (1)..(355): "n" represents an unknown nucleotide
agggttnctgtttnagcaatataaatgttnactgtttgtgatggcagtattctaaagtcattgcatgttttctaaatacagagtttaaataatttcagtaattctnagatgnttcagcttcatcattaagaatatcttttgttttatgttgagttagaaatgccttcatatagacatagtctttcagncctctactgtcagttttcatttctagctgctttcagggttttatgaattttcaggcanagctttaatttatactaagcttagggaagtatggctaatgccaacgnggtatttggttctccttaattccacatgactgagggcatatgatgganctctggggtngggg

SEQ ID NO: 474 - DNA, 1737 bp, Homo sapiens
ccagcctctgccaggttcggtccgccatcctcgtcccgtcctccgccggcccctgccccgcgcccagggatcctccagctcctttcgcccgcgccctccgttcgctccggacaccatggacaagttttggtggcacgcagcctggggactctgcctcgtgccgctgagcctggcgcagatcgatttgaatataacctgccgctttgcaggtgtattccacgtggagaaaaatggtcgctacagcatctctcggacggaggccgctgacctctgcaaggctttcaatagcaccttgcccacaatggcccagatggagaaagctctgagcatcggatttgagacctgcaggtatgggttcatagaagggcacgtggtgattccccggatccaccccaactccatctgtgcagcaaacaacacaggggtgtacatcctcacatccaacacctcccagtatgacacatattgcttcaatgcttcagctccacctgaagaagattgtacatcagtcacagacctgcccaatgcctttgatggaccaattaccataactattgttaaccgtgatggcacccgctatgtccagaaaggagaatacagaacgaatcctgaagacatctaccccagcaaccctactgatgatgacgtgagcagcggctcctccagtgaaaggagcagcacttcaggaggttacatcttttacaccttttctactgtacaccccatcccagacgaagacagtccctggatcaccgacagcacagacagaatccctgctaccaatatggactccagtcatagtacaacgcttcagcctactgcaaatccaaacacaggtttggtggaagatttggacaggacaggacctctttcaatgacaacgcagcagagtaattctcagagcttctctacatcacatgaaggcttggaagaagataaagaccatccaacaacttctactctgacatcaagcaataggaatgatgtcacaggtggaagaagagacccaaatcattctgaaggctcaactactttactggaaggttatacctctcattacccacacacgaaggaaagcaggaccttcatcccagtgacctcagctaagactgggtcctttggagttactgcagttactgttggagattccaactctaatgtcaatcgttccttatcaggagaccaagacacattccaccccagtggggggtcccataccactcatggatctgaatcagatggacactcacatgggagtcaagaaggtggagcaaacacaacctctggtcctataaggacaccccaaattccagaatggctgatcatcttggcatccctcttggccttggctttgattcttgcagtttgcattgcagtcaacagtcgaagaaggtgtgggcagaagaaaaagctagtgatcaacagtggcaatggagctgtggaggacagaaagccaagtggactcaacggagaggccagcaagtctcaggaaatggtgcatttggtgaacaaggagtcgtcagaaactccagaccagtttatgacagctgatgagacaaggaacctgcagaatgtggacatgaagattggggtgtaacacctacaccattatcttggaaagaaacaaccgttggaaacataaccattacagggagctgggacacttaacagatgcaatgtgctactgattgtttcattgcgaatcttttttagcataaaattttctactctttttaa

SEQ ID NO: 475 - DNA, 415 bp, Homo sapiens
agagtagaaaattttatgctaaaaaagattcgcaatgaaacaatcagtagcacattgcatctgttaagtgtcccagctccctgtaatggttatgtttccaacggttgtttctttccaagataatggtgtaggtgttacaccccaatcttcatgtccacattctgcaggttccttgtctcatcagctgtcataaactggtctggagtttctgacgactccttgttcaccaaatgcaccatttcctgagacttgctggcctctccgttgagtccacttggctttctgtcctccacagctccattgccactgttgatcactagctttttcttctgcccacaccttcttcgactgttgactgcaatgcaaactgcaagaatcaaagccaagggccagagggatgcccagatgatcagcc

SEQ ID NO: 476 - DNA, 549 bp, Homo sapiens
aaaatggtcgctacagcatctctcggacggaggccgctgacctctgcaaggctttcaatagcaccttgcccacaatggcccagatggagaaagctctgagcatcggatttgagacctgcaggtatgggttcatagaagggcacgtggtgattccccggatccaccccaactccatctgtgcagcaaacaacacaggggtgtacatcctcacatccaacacctcccagtatgacacatattgcttcaatgcttcagctccacctgaagaagattgtacatcagtcacagacctgcccaatgcctttgatggaccaattaccataactattgttaaccgtgatggcacccgctatgtccagaaaggagaatacagaacgaatcctgaagacatctaccccagcaaccctactggatgatgacgtgagcagcggctcctccagtgaaaggagcagcacttcaggaggttacatcttttacactttttctactgtacacccatcccagacgaagacagtccttggatcacgacagcacagcagatcctgctac

SEQ ID NO: 477 - DNA, 470 bp, Homo sapiens
  misc_feature (1)..(470): "n" represents an unknown nucleotide
tctgtttcaaggaaggatgaataagttttattgaaaatgtggtaactttatttaaaatgatttttaacattatgagagactgctcagattctaagttgttggccttgtgtgtgtgtttttttttaagttctcatcattattacatagactgtgaagtatctttactggaaatgagcccaagcacacatgcatggcatttgttccacaggagggcatccctgggggatgtggctggagcatgagccagctctgtcccagggatgggtcccagcggatctgccaggggcnatggaagtgtttagggtgaaggacaagtagggtaagaggacgccttcagggacccaccagataagccctgnaaacagcctctcccaagggtttttcacccttaggcaaccaatgggggagctttgggggagtgattttnggcccacactgtccaacatttttttaggacccagtcttttttn

SEQ ID NO: 478 - DNA, 425 bp, Homo sapiens
ataaagaaagacaccgttctcagcatcctcagaaggggcagctaagctttataggaggtttcggggattctgattgaacgtaacaaataatagtataaatgaggaagatttaatatggcaaaattcacataatttagaatccagcagagagcacgtgtgggctatttggaatggacagtgaagggccaccttttgcaaaacggagtgacctggcaagtgacaagttggaaatacttttctttcaaaagactggttctaacaaatgttgacagtgtggccaaaatcactcccacagctcccatttgtttgcttaaggtggaaaaccctttgggagaggctgttttcaggctttatctgtgggtgccttgaaggcgttcctctttacctacttgtcctttcacctaaacacttcactgcccctgggg

SEQ ID NO: 479 - DNA, 669 bp, Homo sapiens
ttttttttttttatcttatcagcagaaaagttttattccttttgaggacaaacaattaaaccacatccaaggtcttaacttacagacagaaaccaaagtagccatttaaagcgttagatatcggatacaagacatacactggggagaatgcttcaccatctgaagctcacaccacaatggcccagtggacagctgtgcactctgcttgtgcttaagtgcctgggtgtggctgatgggaaggcgtgtctgcagaacagaagaacagctgtgtttcacaagtactgaagcattttagactgcatgtgggggtatatattttcatgttgaagggaagaggggaaatcagccaagtccctccccacagagcattaagctgccctgcagaagagccacggcagagaagcggacttctccctgctcaggcccggtaaattcctgcagaccttggaagcgtcctttcagcaggtgtcctctgaactggggccatggttcacccgaaaaggcattcgtccatcaaggtcatagagggtggccacccacttggttaacaggataaaaatggagattctccttgtcagctaaccggaattggctttctttggccacggtataaggggcgccttaaggccccaatttttaaaaaatttgccctgttctgagggaattttc

SEQ ID NO: 480 - DNA, 2294 bp, Homo sapiens
cagcgccggctcgcgccctcctgccgcagccaccgagccgccgtctagcgccccgacctcgccaccatgagagccctgctggcgcgcctgcttctctgcgtcctggtcgtgagcgactccaaaggcagcaatgaacttcatcaagttccatcgaactgtgactgtctaaatggaggaacatgtgtgtccaacaagtacttctccaacattcactggtgcaactgcccaaagaaattcggagggcagcactgtgaaatagataagtcaaaaacctgctatgaggggaatggtcacttttaccgaggaaaggccagcactgacaccatgggccggccctgcctgccctggaactctgccactgtccttcagcaaacgtaccatgcccacagatctgatgctcttcagctgggcctggggaaacataattactgcaggaacccagacaaccggaggcgaccctggtgctatgtgcaggtgggcctaaagccgcttgtccaagagtgcatggtgcatgactgcgcagatggaaaaaagccctcctctcctccagaagaattaaaatttcagtgtggccaaaagactctgaggccccgctttaagattattgggggagaattcaccaccatcgagaaccagccctggtttgcggccatctacaggaggcaccgggggggctctgtcacctacgtgtgtggaggcagcctcatcagcccttgctgggtgatcagcgccacacactgcttcattgattacccaaagaaggaggactacatcgtctacctgggtcgctcaaggcttaactccaacacgcaaggggagatgaagtttgaggtggaaaacctaatcctacacaaggactacagcgctgacacgcttgctcaccacaacgacattgccttgctgaagatccgttccaaggagggcaggtgtgcgcagccatcccggactatacagaccatctgcctgccctcgatgtataacgatccccagtttggcacaagctgtgagatcactggctttggaaaagagaattctaccgactatctctatccggagcagctgaaaatgactgttgtgaagctgatttcccaccgggagtgtcagcagccccactactacggctctgaagtcaccaccaaaatgctgtgtgctgctgacccacagtggaaaacagattcctgccagggagactcagggggacccctcgtctgttccctccaaggccgcatgactttgactggaattgtgagctggggccgtggatgtgccctgaaggacaagccaggcgtctacacgagagtctcacacttcttaccctggatccgcagtcacaccaaggaagagaatggcctggccctctgagggtccccagggaggaaacgggcaccacccgctttcttgctggttgctattttgcagtagagtcatctccatcagctgtaagaagagctgggaatataggctctgcacagatggatttgcctgtgccaccaccagggcgaacgacaatagctttaccctcaggcataggcctgggtgctggctgcccagacccctctggccaggatggaggggtggtcctgactcaacatgttactgaccagcaacttgtctttttctggactgaagcctgcaggagttaaaaagggcagggcatctcctgtgcatgggctcgaagggagagccagctcccccgaccggtgggcatttgtgaggcccatggttgagaaatgaataatttcccaattaggaagtgtaagcagctgaggtctcttgagggagcttagccaatgtgggagcagcggtttggggagcagagacactaacgacttcagggcagggctctgatattccatgaatgtatcaggaaatatatatgtgtgtgtatgtttgcacacttgtgtgtgggctgtgagtgtaagtgtgagtaagagctggtgtctgattgttaagtctaaatatttccttaaactgtgtggactgtgatgccacacagagtggtctttctggagaggttataggtcactcctggggcctcttgggtcccccacgtgacagtgcctgggaatgtattattctgcagcatgacctgtgaccagcactgtctcagtttcactttcacatagatgtccctttcttggccagttatcccttccttttagcctagttcatccaatcctcactgggtggggtgaggaccactcctgtacactgaatatttatatttcactatttttatttatatttttgtaattttaaataaaagtgatcaataaaatgtgatttttctgatg

SEQ ID NO: 481 - DNA, 701 bp, Homo sapiens
cagaaaaatcacattttattgatcacttttatttaaaattacaaaaatataaataaaaatagtgaaatataaatattcagtgtacaggagtggtcctcaccccacccagtgaggattggatgaactaggctaaaaggaagggataactggccaagaaagggacatctatgtgaaagtgaaactgagacagtgctggtcacaggtcatgctgcagaataatacattcccaggcactgtcacgtgggggacccaagaggccccaggagtgacctataacctctccagaaagaccactctgtgtggcatcacagtccacacagtttaaggaaatatttagacttaacaatcagacaccagctcttactcacacttacactcacagcccacacacaggtgtgcaaacatacacacacatatatatttcctgatacattcatggaatatcagagccctgccctgaagtcgttagtgtctctgctccccaaaccgctgctcccacattggctaagctccctcaagagacctcagctgttacacttcctaattgggaaattattcatttctcaaccatgggcctcacaaatgcccaccgtcgggggagctggctctcccttcacccatgcacaggagatgccctgcccttttaactcctgcaggctcagtccagaaaaaagcaagttgctggcagtaacatggtgagt

SEQ ID NO: 482 - DNA, 9453 bp, Homo sapiens
gagctcacattaactatttacagggtaactgcttaggaccagtattatgaggagaatttacctttcccgcctctctttccaagaaacaaggagggggtgaaggtacggagaacagtatttcttctgttgaaagcaacttagctacaaagataaattacagctatgtacactgaaggtagctatttcattccacaaaataagagttttttaaaaagctatgtatgtatgtgctgcatatagagcagatatacagcctattaagcgtcgtcactaaaacataaaacatgtcagcctttcttaaccttactcgccccagtctgtcccgacgtgacttcctcgaccctctaaagacgtacagaccagacacggcggcggcggcgggagaggggattccctgcgcccccggacctcagggccgctcagattcctggagaggaagccaagtgtccttctgccctcccccggtatcccatccaaggcgatcagtccagaactggctctcggaagcgctcgggcaaagactgcgaagaagaaaagacatctggcggaaacctgtgcgcctggggcggtggaactcggggaggagagggagggatcagacaggagagtggggactaccccctctgctcccaaattggggcagcttcctgggtttccgattttctcatttccgtgggtaaaaaaccctgcccccaccgggcttacgcaatttttttaaggggagaggagggaaaaaatttgtgggggggtacgaaaaggcggaaagaaacagtcattcacatgggcttggttttcagtcttataaaaaggaaggttctctcggttagcgaccaattgtcatacgacttgcagtgagcgtcaggagcacgtccaggaactcctcagcagcgcctccttcagctccacagccagacgccctcagacagcaaagcctacccccgcgccgcgccctgcccgccgctcggatgctcgcccgcgccctgctgctgtgcgcggtcctggcgctcagccatacaggtgagtacctggcgccgcgcaccggggactccggttccacgcacccgggcagagtttccgctctgacctcctgggtctatcccagtactccgacttctctccgaatagagaagctacgtgacttgggaaagagcttggaccgctagagtccgaaagaactccgtggatattccagctttcccacaagcactgatcattatgagccagttacttaaccgatctgagacactctcacctcctaaatagggatagatgatactaatttgcaggttgtcattatgataagacaggatctgatcaatatatgtgaattgtttatatttggaacctttttattgagtggaagaagttgttttaaatattctagtcagttctttcctgctcccaggaaagcccggattatgttttaagataagcaaaatgtcttaaaagtaagctgttttactttgaatttttccctaaatgttgattagtgtactagatccattttaatttggaaagtgaagtgctacttatttgaacttcttaaaaatgctaattttaacatctaaagagttaactaagaaaagcttagtaacatgatgtaccaagttgaatatgctgttatccttatttagaatagaaaattggtatttctacgttttatccattctaaggcaggttaaaaaattgtatttccatgactacctatatatttcttgaatttattattgtaaagttgattcatagtcaaacaattaaatgtttaaattaagattaagacactagagaatgatttatttgctgtcctttaattgcagcaaatccttgctgttcccacccatgtcaaaaccgaggtgtatgtatgagtgtgggatttgaccagtataagtgcgattgtacccggacaggattctatggagaaaactgctcaacacgtaagtttgtcctttggttgcctcattaggagtggggctggatacagttatcattgtatagatttgtgtcttataatgagtcccattaatttctccctccctttcttcgtcttcttgcagcggaatttttgacaagaataaaattatttctgaaacccactccaaacacagtgcactacatacttacccacttcaagggattttggaacgttgtgaataacattcccttccttcgaaatgcaattatgagttatgtcttgacatgtaagtacaagtgtctttctaaggtttttagccttctcaaagaaaaatatgctttataatactgtaagcctaatctaaaaacatatttccaagcttatcaaaaagactttaagatagcttttaagtttgccttccatcttaatcgccaaaaatattgacatttagtcccatccagtttatacagtctgctcacaactctgtatacctcttctaacctttactgtttggtcagtttgtggaggtagcatggtccagctgtttattgaatgcccatgggccacagaattgttctgaacatgtagcacccattaaaataaatttggatttggatcagcaagaaaataactttccatgattctaaagtgggtgccatactcagccattcctttcataggcctcttggatagtgagcagatggctacctgaaaaatcaatattgccagattataatgtgcagagtatatgtattttattaaagatgtatttcaagtggccattagactataaagtgtagttgtttaaaaatagattttttttattttggagttacattcaacctcaggtgccactttccacattttacaataaaaataatggttgatttacttaacaaatgagaataaataaaacatttttttctttgaaaatttcagccagatcacatttgattgacagtccaccaacttacaatgctgactatggctacaaaagctgggaagccttctctaacctctcctattatactagagcccttcctcctgtgcctgatgattgcccgactcccttgggtgtcaaaggtgagtaagaagaatccattagagatgtattaactataagacgggctgcattgctgccaaaaaaaaaaattgaccttagactaccatttatttattaacaaaagcagtttttacttttagcatggttatctatgggtattttttaaagtatgagtctatataaactattatgtaaaagcaaatgagcgtcttggtataatgtcttaatattttcaaattatttctttagaaatgaaataattctaattaaaatagataaaatcattcagtaagaagttgttccaccatatcttagaactgttgtttatattatgatcctattcacaattgtaattctcatataaatgaagaattcttggtagattgacagtcaccatctcctttcttgaatacatagatggattcttaccttagctttctcatttttcaggtaaaaagcagcttcctgattcaaatgagattgtggaaaaattgcttctaagaagaaagttcatccctgatccccagggctcaaacatgatgtttgcattctttgcccagcacttcacgcatcagtttttcaagacagatcataagcgagggccagctttcaccaacgggctgggccatggggtaagatagagttaatatcttagagttagtaaaattataccaaatcatagtcaagggctaacattaaaggagatatacagatagatagatccaaataacttatccactttttttaaaaagaagtcttatctataaaaaccttaaaggaattttccatttacttcactggtctagtaaaattatacacacacacagacatgcacacacatatataaacattcacacacatacatatgtacaggtattgttatttgtaatttgacccttgtattttttagtttaaaatgttagtactgcaaaatgttatgtcctcaaaaacacattgtaccatgattatgccgctttcaatattgtaaagtgaggtttttgccgcattattattttttggatttcaatagcatagcttcaagttattcgtaagaattttttataaataatacatttttatacttttttataattaccatatcatcatagtgaagtatataatatatatgatataagctcaatatagtatattaattccgttaaacacaaagacatatcagtttgtagctttggtggataaacaaattaatttagcaattcatggctatgaaaaatgtatattttatttaaaaattttaaagaaagctaaatgatcaaattatttaatgatgaattatatgatagacactttatataagaaaaacttcaacagcaacaaattaaaattttttcatcattttctaggtggacttaaatcatatttacggtgaaactctggctagacagcgtaaactgcgccttttcaaggatggaaaaatgaaatatcaggtatgcttcctttgactattaagacttagttattaccgcttatacccatattttaaaatccctaaaaatgtgttccttaactttttaactgatgtttatttatttatttatttttttagataattgatggagagatgtatcctcccacagtcaaagatactcaggcagagatgatctaccctcctcaagtccctgagcatctacggtttgctgtggggcaggaggtctttggtctggtgcctggtctgatgatgtatgccacaatctggctgcgggaacacaacagagtatgcgatgtgcttaaacaggagcatcctgaatggggtgatgagcagttgttccagacaagcaggctaatactgataggtaaacaagaaaatgatttatataaaaccctcttccccagggaaaattagtgtgctatctttgttatgttttgagtaaatgacaagatgtggtaaatgaaaactcacacattctatatacattaaatatgtaagcatgactgataaaatagctatcttttgatactgacaaggaagaaaacagaaatgaaggaatagcaaattttaaaaattgcattccagttgcttgaaagcttgtgatcagatgcaataaatgtttttattatttattttgtgcaaataggagagactattaagattgtgattgaagattatgtgcaacacttgagtggctatcacttcaaactgaaatttgacccagaactacttttcaacaaacaattccagtaccaaaatcgtattgctgctgaatttaacaccctctatcactggcatccccttctgcctgacacctttcaaattcatgaccagaaatacaactatcaacagtttatctacaacaactctatattgctggaacatggaattacccagtttgttgaatcattcaccaggcaaattgctggcagggtaagcattattattgaaaaccaaaacaaaagactagtcagtaactttagaatttctgccacggaaattatttttcttaaacttactaaaagagtagttagttatattgctagtaaaattattttattgatataagaagcctaactttgtttgaaaagtctaaacttttagtctagtctacagttgtcagacaaatagcaaattgtacccctaccttaaaaatattttcaaaaagtatctataatcttataggaataaatattttaggcttgaatactagtgttatttttgaaatgtaaaaaggcaaattagttctaggctggtgtcccattgaattttaagcagagctcctgttgaaatgtaggtaagcatctttccagcaaataaaaattgtctccgctgggagtttcagttttacctgatttgtacctaaggcaagctgaatacaaacagtaaatatgcctaaaattcttgttttacaactaattttactttccacaggttgctggtggtaggaatgttccacccgcagtacagaaagtatcacaggcttccattgaccagagcaggcagatgaaataccagtcttttaatgagtaccgcaaacgctttatgctgaagccctatgaatcatttgaagaacttacaggtaagaaacagtttctaaacttcttcgttttttgtttgtttgtttgtttttgttgtttttggttttcttttcgagatggagccgccctctgtcacccaggctggagtgcagtggcgccatctcggctcactgcaacctccgcctcctgggttcaagcaattctcctgcctcaacttcctgagtagctgggactacaggctcacgtcgcacgcatggataattttttgtattttcagtatagacggggtttcaccgtgttagccaggctggtctcaaactcctgacctagtgatccgccggcttcggcctcccgaagtgctgggattacaggcgtgagccaccgcgcctggcccctaaacttcttaaaagaatcaggggtcaaatggaaacagagaagttggcagcaaattgagcaaaagaatcaaactgttttttattttgtgaagtttgacattggttgtatctctgtcttcatcgccttcacaggagaaaaggaaatgtctgcagagttggaagcactctatggtgacatcgatgctgtggagctgtatcctgcccttctggtagaaaagcctcggccagatgccatctttggtgaaaccatggtagaagttggagcaccattctccttgaaaggacttatgggtaatgttatatgttctcctgcctactggaagccaagcacttttggtggagaagtgggttttcaaatcatcaacactgcctcaattcagtctctcatctgcaataacgtgaagggctgtccctttacttcattcagtgttccagatccagagctcattaaaacagtcaccatcaatgcaagttcttcccgctccggactagatgatatcaatcccacagtactactaaaagaacgttcgactgaactgtagaagtctaatgatcatatttatttatttatatgaaccatgtctattaatttaattatttaataatatttatattaaactccttatgttacttaacatcttctgtaacagaagtcagtactcctgttgcggagaaaggagtcatacttgtgaagacttttatgtcactactctaaagattttgctgttgctgttaagtttggaaaacagtttttattctgttttataaaccagagagaaatgagttttgacgtctttttacttgaatttcaacttatattataagaacgaaagtaaagatgtttgaatacttaaacactatcacaagatggcaaaatgctgaaagtttttacactgtcgatgtttccaatgcatcttccatgatgcattagaagtaactaatgtttgaaattttaaagtacttttggttatttttctgtcatcaaacaaaaacaggtatcagtgcattattaaatgaatatttaaattagacattaccagtaatttcatgtctactttttaaaatcagcaatgaaacaataatttgaaatttctaaattcatagggtagaatcacctgtaaaagcttgtttgatttcttaaagttattaaacttgtacatataccaaaaagaagctgtcttggatttaaatctgtaaaatcagatgaaattttactacaattgcttgttaaaatattttataagtgatgttcctttttcaccaagagtataaacctttttagtgtgactgttaaaacttccttttaaatcaaaatgccaaatttattaaggtggtggagccactgcagtgttatctcaaaataagaatattttgttgagatattccagaatttgtttatatggctggtaacatgtaaaatctatatcagcaaaagggtctacctttaaaataagcaataacaaagaagaaaaccaaattattgttcaaatttaggtttaaacttttgaagcaaacttttttttatccttgtgcactgcaggcctggtactcagattttgctatgaggttaatgaagtaccaagctgtgcttgaataacgatatgttttctcagattttctgttgtacagtttaatttagcagtccatatcacattgcaaaagtagcaatgacctcataaaatacctcttcaaaatgcttaaattcatttcacacattaattttatctcagtcttgaagccaattcagtaggtgcattggaatcaagcctggctacctgcatgctgttccttttcttttcttcttttagccattttgctaagagacacagtcttctcatcacttcgtttctcctattttgttttactagttttaagatcagagttcactttctttggactctgcctatattttcttacctgaacttttgcaagttttcaggtaaacctcagctcaggactgctatttagctcctcttaagaagattaaaagagaaaaaaaaaggcccttttaaaaatagtatacacttattttaagtgaaaagcagagaattttatttatagctaattttagctatctgtaaccaagatggatgcaaagaggctagtgcctcagagagaactgtacggggtttgtgactggaaaaagttacgttcccattctaattaatgccctttcttatttaaaaacaaaaccaaatgatatctaagtagttctcagcaataataataatgacgataatacttcttttccacatctcattgtcactgacatttaatggtactgtatattacttaatttattgaagattattatttatgtcttattaggacactatggttataaactgtgtttaagcctacaatcattgatttttttttgttatgtcacaatcagtatattttctttggggttacctctctgaatattatgtaaacaatccaaagaaatgattgtattaagatttgtgaataaatttttagaaatctgattggcatattgagatatttaaggttgaatgtttgtccttaggataggcctatgtgctagcccacaaagaatattgtctcattagcctgaatgtgccataagactgaccttttaaaatgttttgagggatctgtggatgcttcgttaatttgttcagccacaatttattgagaaaatattctgtgtcaagcactgtgggttttaatatttttaaatcaaacgctgattacagataatagtatttatataaataattgaaaaaaattttcttttgggaagagggagaaaatgaaataaatatcattaaagataactcaggagaatcttctttacaattttacgtttagaatgtttaaggttaagaaagaaatagtcaatatgcttgtataaaacactgttcactgttttttttaaaaaaaaaacttgatttgttattaacattgatctgctgacaaaacctgggaatttgggttgtgtatgcgaatgtttcagtgcctcagacaaatgtgtatttaacttatgtaaaagataagtctggaaataaatgtctgtttatttttgtactatttaaaaaaaaaaaaaaaaatcgatgtcgactcgagtc

SEQ ID NO: 483 - DNA, 228 bp, Homo sapiens
  misc_feature (1)..(228): "n" represents an unknown nucleotide
aaaataaacagacatttatttccagacttatcttttacataagttaaatacacatttgtctgaggcactgaaacattcacatacacaacccaaattcccaggntttgtcagcagancaatgttaataacaaatcaagtttttttttaaaaaaaacagtgaacagtgttttatacaagcatattgactatttctttcttaaccttaaacattctaaacgtaaaattgta

SEQ ID NO: 484 - DNA, 408 bp, Homo sapiens
gtttaagcctacaatcattgattttttttttgttatgtcacaatcagtatattttctttggggttacctctctgaatattatgtaaacaatccaaagaaatgattgtattaagatttgtgaataaatttttagaaatctgattggcatattgagatatttaaggttgaatgtttgtccttaggataggcctatgtgctagcccacaaagaatattgtctcattagcctgaatgtgccataagactgaccttttaaaatgttttgagggatctgtggatgcttcgttaatttgttcagccacaatttattgagaaaatattctgtgtcaagcactgtgggttttaatatttttaaatcaaacgctgattacagataatagtattttatataaataaattgaaaaaaatt

SEQ ID NO: 485 - DNA, 2415 bp, Homo sapiens
cggcgccgcgagcttctcctctcctcacgaccgaggcagagcagtcattatggcgaaccttggctgctggatgctggttctctttgtggccacatggagtgacctgggcctctgcaagaagcgcccgaagcctggaggatggaacactgggggcagccgatacccggggcagggcagccctggaggcaaccgctacccacctcagggcggtggtggctgggggcagcctcatggtggtggctgggggcagcctcatggtggtggctgggggcagccccatggtggtggctggggacagcctcatggtggtggctggggtcaaggaggtggcacccacagtcagtggaacaagccgagtaagccaaaaaccaacatgaagcacatggctggtgctgcagcagctggggcagtggtggggggccttggcggctacatgctgggaagtgccatgagcaggcccatcatacatttcggcagtgactatgaggaccgttactatcgtgaaaacatgcaccgttaccccaaccaagtgtactacaggcccatggatgagtacagcaaccagaacaactttgtgcacgactgcgtcaatatcacaatcaagcagcacacggtcaccacaaccaccaagggggagaacttcaccgagaccgacgttaagatgatggagcgcgtggttgagcagatgtgtatcacccagtacgagagggaatctcaggcctattaccagagaggatcgagcatggtcctcttctcctctccacctgtgatcctcctgatctctttcctcatcttcctgatagtgggatgaggaaggtcttcctgttttcaccatctttctaatctttttccagcttgagggaggcggtatccacctgcagcccttttagtggtggtgtctcactctttcttctctctttgtcccggataggctaatcaatacccttggcactgatgggcactggaaaacatagagtagacctgagatgctggtcaagccccctttgattgagttcatcatgagccgttgctaatgccaggccagtaaaagtataacagcaaataaccattggttaatctggacttatttttggacttagtgcaacaggttgaggctaaaacaaatctcagaacagtctgaaatacctttgcctggatacctctggctccttcagcagctagagctcagtatactaatgccctatcttagtagagatttcatagctatttagagatattttccattttaagaaaacccgacaacatttctgccaggtttgttaggaggccacatgatacttattcaaaaaaatcctagagattcttagctcttgggatgcaggctcagcccgctggagcatgagctctgtgtgtaccgagaactggggtgatgttttacttttcacagtatgggctacacagcagctgttcaacaagagtaaatattgtcacaacactgaacctctggctagaggacatattcacagtgaacataactgtaacatatatgaaaggcttctgggacttgaaatcaaatgtttgggaatggtgcccttggaggcaacctcccattttagatgtttaaaggaccctatatgtggcattcctttctttaaactataggtaattaaggcagctgaaaagtaaattgccttctagacactgaaggcaaatctcctttgtccatttacctggaaaccagaatgattttgacatacaggagagctgcagttgtgaaagcaccatcatcatagaggatgatgtaattaaaaaatggtcagtgtgcaaagaaaagaactgcttgcatttctttatttctgtctcataattgtcaaaaaccagaattaggtcaagttcatagtttctgtaattggcttttgaatcaaagaatagggagacaatctaaaaaatatcttaggttggagatgacagaaatatgattgatttgaagtggaaaaagaaattctgttaatgttaattaaagtaaaattattccctgaattgtttgatattgtcacctagcagatatgtattacttttctgcaatgttattattggcttgcactttgtgagtatctatgtaaaaatatatatgtatataaaatatatattgcataggacagacttaggagttttgtttagagcagttaacatctgaagtgtctaatgcattaacttttgtaaggtactgaatacttaatatgtgggaaacccttttgcgtggtccttaggcttacaatgtgcactgaatcgtttcatgtaagaatccaaagtggacaccattaacaggtctttgaaatatgcatgtactttatattttctatatttgtaactttgcatgttcttgttttgttatataaaaaaattgtaaatgtttaatatctgactgaaattaaacgagcgaagatgagcacc

SEQ ID NO: 486 - DNA, 296 bp, Homo sapiens
gtgctcatcttcgctcgtttaatttcagtcagatattaaacatttacaatttttttatataacaaaacaagaacatgcaaagttacaaatatagaaaatataaagtacatgcatatttcaaagacctgttaatggtgtccactttggattcttacatgaaacgattcagtgcacattgtaagcctaaggaccacgcaaaagggtttcccacatattaagtattcagtaccttacaaaagttaatgccatagtcacttcaagaatggtgatactgccctaaacaaatccccgaagtc

SEQ ID NO: 487 - DNA, 335 bp, Homo sapiens
gtcaagttcatagtttctgtaattggcttttgaatcaaagaatagggagacaatctaaaaaatatcttaggttggagatgacagaaatatgattgatttgaagtggaaaaagaaattctgttaatgttaattaaagtaaaattattccctgaattgtttgatattgtcacctagcagatatgtattacttttctgcaatgttattattggcttgcactttgtgagtattctatgtaaaaatatatatgtatataaaatatatattgcataggacagacttaggagttttgtttagagcagttaacatctgaagtgtctaatgcattaacttttgt

SEQ ID NO: 488 - DNA, 409 bp, Homo sapiens
  misc_feature (1)..(409): "n" represents an unknown nucleotide
agtctagatgaatttattgccattcacatatttcatagaaaaaaagatgtagcaaacgggtcagggttgtacaaaaaaaaaaaaaaatccaggtttatataggttgctctatttacatctgagagcacagctgtcctggcatcaggcacagcagctgcacttgtctgacgtccctttgcagatgcagccctgggcacacttggcacagcccacaggnangcanggagcagcagctcttcttgcaggaggtgcatttgcactctttgcatttgcaggagccggcacaggcacaggagccaacaggcgangcaggagcagttggggtccatttcgaggcaaggagaagcaggagttcccgattcaagaggaaaacacgcagcgggacagattctcgtgccgaattcttggc

SEQ ID NO: 489 - DNA, 315 bp, Homo sapiens
  misc_feature (1)..(315): "n" represents an unknown nucleotide
tctgtcccgctgcgtgttttcctcttgatcgggaactcctgcttctccttgcctcgaaatggaccccaactgctcctgctcgcctgttggctcctgtgcctgtgccggctcctgcaaatgcaaagagtgcaaatgcacctcctgcaagaagagctgctgctcctgctgccctgtgntcgtcgcaacgtgtgcccagggctgcatctgcaaagggacgtcagacaagtgcagctgctgtgcctgatgccaggacanctntgctctcagangtaaatngagnaaaactctataaancncggaatttttttttttttt

SEQ ID NO: 490 - DNA, 320 bp, Homo sapiens
  misc_feature (1)..(320): "n" represents an unknown nucleotide
gatgngttgggtttattgaagagagcaagnctggtgggcgtggactcaaagcatggcagcggcagaggctggagcagttggggatcttcagcttctaaatgctaattacacagtgagctttgggctattttttccatgagcttaatgatgctttctctgggcttttnggggagggtttccaccagcttcttcagctgagcccctgcctccctcatgtcttnatcagggctgaaaagttccatggcagcctnataactggagggtttttccatgaggaggntttcgatganacgtttaaactcgggcagatntctgcagaa

SEQ ID NO: 491 - DNA, 336 bp, Homo sapiens
  misc_feature (1)..(336): "n" represents an unknown nucleotide
tccccctncgtccaccattgaaactcgcttgtcaccctcaccctggtcacactggctctctgctgcagctccgcttctgcagagatctgcccgagctttcagcgtggtcatcgaaaccctcctcatggacacaccctccagttatgaggctgccatggaacttttcagccctgatcaagacatgagggaggcaggggctcagctgaagaagctggtggacaccctcccccaaaagcccagagaaagcatcattaagctcatgggaaaaaatagcccaaagctcactgtgtaattaggcattttaggaagcttgaagatcccccaactggttccagc

SEQ ID NO: 492 - DNA, 2376 bp, Homo sapiens
cgcgcggcccctgtcctccggcccgagatgaatcctgcggcagaagccgagttcaacatcctcctggccaccgactcctacaaggttactcactataaacaatatccacccaacacaagcaaagtttattcctactttgaatgccgtgaaaagaagacagaaaactccaaattaaggaaggtgaaatatgaggaaacagtattttatgggttgcagtacattcttaataagtacttaaaaggtaaagtagtaaccaaagagaaaatccaggaagccaaagatgtctacaaagaacatttccaagatgatgtctttaatgaaaagggatggaactacattcttgagaagtatgatgggcatcttccaatagaaataaaagctgttcctgagggctttgtcattcccagaggaaatgttctcttcacggtggaaaacacagatccagagtgttactggcttacaaattggattgagactattcttgttcagtcctggtatccaatcacagtggccacaaattctagagagcagaagaaaatattggccaaatatttgttagaaacttctggtaacttagatggtctggaatacaagttacatgattttggctacagaggagtctcttcccaagagactgctggcataggagcatctgctcacttggttaacttcaaaggaacagatacagtagcaggacttgctctaattaaaaaatattatggaacgaaagatcctgttccaggctattctgttccagcagcagaacacagtaccataacagcttgggggaaagaccatgaaaaagatgcttttgaacatattgtaacacagttttcatcagtgcctgtatctgtggtcagcgatagctatgacatttataatgcgtgtgagaaaatatggggtgaagatctaagacatttaatagtatcgagaagtacacaggcaccactaataatcagacctgattctggaaaccctcttgacactgtgttaaaggttttggagattttaggtaagaagtttcctgttactgagaactcaaagggttacaagttgctgccaccttatcttagagttattcaaggggatggagtagatattaataccttacaagagattgtagaaggcatgaaacaaaaaatgtggagtattgaaaatattgccttcggttctggtggaggtttgctacagaagttgacaagagatctcttgaattgttccttcaagtgtagctatgttgtaactaatggccttgggattaacgtcttcaaggacccagttgctgatcccaacaaaaggtccaaaaagggccgattatctttacataggacgccagcagggaattttgttacactggaggaaggaaaaggagaccttgaggaatatggtcaggatcttctccatactgtcttcaagaatggcaaggtgacaaaaagctattcatttgatgaaataagaaaaaatgcacagctgaatattgaactggaagcagcacatcattaggctttatgactgggtgtgtgttgtgtgtatgtaatacataatgtttattgtacagatgtgtggggtttgtgttttatgatacattacagccaaattatttgttggtttatggacatactgccctttcattttttttcttttccagtgtttaggtgatctcaaattaggaaatgcatttaaccatgtaaaagatgagtgctaaagtaagctttttagggccctttgccaataggtagtcattcaatctggtattgatcttttcacaaataacagaactgagaaacttttatatataactgatgatcacataaaacagatttgcataaaattaccatgattgctttatgtttatatttaacttgtatttttgtacaaacaagattgtgtaagatatatttgaagtttcagtgatttaacagtctttccaacttttcatgatttttatgagcacagactttcaagaaaatacttgaaaataaattacattgccttttgtccattaatcagcaaataaaacatggccttaacaaagttgtttgtgttattgtacaatttgaaaattatgtcgggacataccctatagaattactaaccttactgccccttgtagaatatgtattaatcattctacattaaagaaaataatggttcttactggaatgtctaggcactgtacagttattatatatcttggttgttgtattgtaccagtgaaatgccaaatttgaaaggcctgtactgcaattttatatgtcagagattgcctgtggctctaatatgcacctcaagattttaaggagataatgtttttagagagaatttctgcttccactatagaatatatacataaatgtaaaatacttacaaaagtgg

SEQ ID NO: 493 - DNA, 395 bp, Homo sapiens
  misc_feature (1)..(395): "n" represents an unknown nucleotide
tttacaatttaatatccaatttaattttttaaaaacttaataaaaaatataacagaattgaaacatttaagtacactcactacccactccagtaattcatttaagtcataccaactatagaatatgananataaattcagaagtgtaattactttaaaatacactacttccacttttgtaagtattttacatttatgtatatattctatagtggaagcagaaattctctctaaaaacattatctccttaaaatcttgaggtgcatattagagccacaggaaatctctgacatataaaattgcagtacaggcctttcaaatttggcatttcactggtacnatacaacancccgagatatataataactggtacagtgcctagacattccagtaaga

SEQ ID NO: 494 - DNA, 395 bp, Homo sapiens
  misc_feature (1)..(395): "n" represents an unknown nucleotide
aaatgcacagntgaatattgaactggaagcagcacatcattaggctttatgactgggtgtgtgttgtgtgtatgtaatacataatgtttattgtacagatgtgtggggtttgtgttttatgatacattacagccaaattatttgttggtttatggacatactgccctttcattttttttcttttccagtgtttaggtgatctcaaattaggaaatgcatttaaccatgtaaaagatgagtgctaaagtaagctttttagggccctttgccaataggtagtcattcaatctggtattgatcttttcacaaataacagaactgagaaacttttatatataactgatgatcacataaaacagatttgcataaaattaccatgattgctttatgtttat

SEQ ID NO: 495 - DNA, 3826 bp, Homo sapiens
gaattcgggtggagtcctgaaggagggcctgatgtcttcatcattctcaaattcttgtaagctctgcgtcgggtgaaaccagacaaagccgcgagcccagggatgggagcacgcgggggacggcctgccggcggggacgacagcattgcgcctgggtgcagcagtgtgcgtctcggggaagggaagatattttaaggcgtgtctgagcagacggggaggcttttccaaacccaggcagcttcgtggcgtgtgcggtttcgacccggtcacacaaagcttcagcatgtcatgtgaggacggtcgggccctgaaaggaacgctctcggaattggccgcggaaaccgatctgcccgttgtgtttgtgaaacagagaaagataggcggccatggtccaaccttgaaggcttatcaggagggcagacttcaaaagctactaaaaatgaacggccctgaagatcttcccaagtcctatgactatgaccttatcatcattggaggtggctcaggaggtctggcagctgctaaggaggcagcccaatatggcaagaaggtgatggtcctggactttgtcactcccacccctcttggaactagatggggtcttggaggaacatgtgtgaatgtgggttgcatacctaaaaaactgatgcatcaagcagctttgttaggacaagccctgcaagactctcgaaattatggatggaaagtcgaggagacagttaagcatgattgggacagaatgatagaagctgtacagaatcacattggctctttgaattggggctaccgagtagctctgcgggagaaaaaagtcgtctatgagaatgcttatgggcaatttattggtcctcacaggattaaggcaacaaataataaaggcaaagaaaaaatttattcagcagagagttttctcattgccactggtgaaagaccacgttacttgggcatccctggtgacaaagaatactgcatcagcagtgatgatcttttctccttgccttactgcccgggtaagaccctggttgttggagcatcctatgtcgctttggagtgcgctggatttcttgctggtattggtttaggcgtcactgttatggttaggtccattcttcttagaggatttgaccaggacatggccaacaaaattggtgaacacatggaagaacatggcatcaagtttataagacagttcgtaccaattaaagttgaacaaattgaagcagggacaccaggccgactcagagtagtagctcagtccaccaatagtgaggaaatcattgaaggagaatataatacggtgatgctggcaataggaagagatgcttgcacaagaaaaattggcttagaaaccgtaggggtgaagataaatgaaaagactggaaaaatacctgtcacagatgaagaacagaccaatgtgccttacatctatgccattggcgatatattggaggataaggtggagctcaccccagttgcaatccaggcaggaagattgctggctcagaggctctatgcaggttccactgtcaagtgtgactatgaaaatgttccaaccactgtatttactcctttggaatatggtgcttgtggcctttctgaggagaaagctgtggagaagtttggggaagaaaatattgaggtttaccatagttacttttggccattggaatggacgattccgtcaagagataacaacaaatgttatgcaaaaataatctgtaatactaaagacaatgaacgtgttgtgggctttcacgtactgggtccaaatgctggagaagttacacaaggctttgcagctgcgctcaaatgtggactgaccaaaaagcagctggacagcacaattggaatccaccctgtctgtgcagaggtattcacaacattgtctgtgaccaagcgctctggggcaagcatcctccaggctggctgctgaggttaagccccagtgtggatgctgttgccaagactgcaaaccactggctcgtttccgtgcccaaatccaaggcgaagttttctagagggttcttgggctcttggcacctgcgtgtcctgtgcttaccaccgcccaaggcccccttggatctcttggataggagttggtgaatagaaggcaggcagcatcacactggggtcactgacagacttgaagctgacatttggcagggcatcgaagggatgcatccatgaagtcaccagtctcaagcccatgtggtaggcggtgatggaacaactgtcaaatcagttttagcatgacctttccttgtggattttcttattctcgttgtcaagttttctagggttgaatttttttcttttttctccatggtgttaatgatattagagatgaaaaacgttagcagttgatttttgtccaaaagcaagtcatggctagagtatccatgcaaggtgtcttgttgcatggaagggatagtttggctcccttggaggctatgtaggcttgtcccgggaaagagaactgtcctgcagctgaaatggactgttctttactgacctgctcagcagtttcttctctcatatattcccaaaacaagtacatctgcgatcaactctagccaaatttgcccctgtgtgctacatgatggatgattattattttaaggtctgtttaggaagggaaatggctacttggccagccattgcctggcatttggtagtatagtatgattctcaccattatttgtcatggaggcagacatacaccagaaatgggggagaaacagtacatatctttctgtctttagtttattgtgtgctggtctaagcaagctgagatcatttgcaatggaaaacacgtaacttgtttaaaagtttttctggtagctttagctttatgctaaaaaaaataatgacattgggtatctatttctttctaagacatacattagtaggaaaataagtcttttcatgcttatgatttagctgttttgtggtaattgctttttaaaggaagttattaatatcataagttattattaatattttgaacacaggtggatgtgaaggattttcatttaaaaaccaagtggttttgactttttctgttgaatgaacaactgtgccttgtggaatttttgcagaagtgtttatgctttgttagcatttcaacttgcattattataaagaggtattaatgcctcagttatgtgtttgtcaatgtactggctgaggattctatctcagctgtcttttctaactgtgtaggttgagttttgaacacgtgcttgtggacatcagcctcctgccagcagttcttgaagcttctttttcattcctgctactctacctgtatttctcagttgcagcactgagtggtcaaaatacatttctgggccacctcagggaacccatgcatctgcctggcatttaggcagcagagcccctgaccgtcccccacaggctctgcctcacgtcctcatctcatttggctgtgtaaagaaatgggaaaagggaaaaggagagagcaattgaggcagttgaccatattcagttttatttatttatttttaatttgtttttttctccaagtccaccagtctctgaaattagaacagtaggcggtatgagataatcaggcctaatcatgttgtgattctcttttcttagtggagtggaatgttctatccccacaagaaggattatatcttatagacttgtcttgttcagattctgtatttacccattttattgaaacatatactaagttccatgtatttttgttacaaatcttctgaaaaaaaacaaaacaatgtgaaacattaaaattaaaaggcattaataataaaaaaaaaaaaaaaaacccgaattc

SEQ ID NO: 496 - DNA, 527 bp, Homo sapiens
ttttattattaatgccttttaattttaatgtttcacattgttttgttttttttcagaagatttgtaacaaaaatacatggaacttagtatatgtttcaataaaatgggtaaatacagaatctgaacaagacaagtctataagatataatccttcttgtggggatagaacattccactccactaagaaaagagaatcacaacatgattaggcctgattatctcataccgcctactgttctaatttcagagactggtggacttggagaaaaaaacaaattaaaaataaataaataaaactgaatatggtcaactgcctcaattgctctctccttttcccttttcccatttctttacacagccaaatgagatgaggacgtgaggcagagccttgtggggacggtcaggggctctgctgcctaaatgccaggcagatgcatgggttccctgaggtggcccagaaatgtattttgaccactcagtgctgcaactgagaaatacaggtagagtagcaggaatgaaaaagaagc

SEQ ID NO: 497 - DNA, 421 bp, Homo sapiens
tgaatgaacaactgtgccttgtggaatttttgcagaagtgtttatgctttgttagcatttcaacttgcattattataaagaggtattaatgcctcagttatgtgtttgtcaatgtactggctgaggattctatctcagctgtcttttctaactgtgtaggttgagttttgaacacgtgcttgtggacatcaggcctcctgccagcagttcttgaagcttctttttcattcctgctactctacctgtatttctcagttgcagcactgagtggtcaaaatacatttctgggccacctcagggaacccatgcatctgcctggcatttaggcagcagacccctgaccgtcccccacagggctctgctgcacgtcctcatctcatttggctgtgtaaagaaatgggaaaagggaaaaggagagagc

SEQ ID NO: 498 - DNA, 3547 bp, Homo sapiens
gcactcgcccggctcgcccgctttcgcacccagttcacgcgccacagctatgtgtccccgagccgcgcgggcgcccgcgacgctactcctcgccctgggcgcggtgctgtggcctgcggctggcgcctgggagcttacgattttgcacaccaacgacgtgcacagccggctggagcagaccagcgaggactccagcaagtgcgtcaacgccagccgctgcatgggtggcgtggctcggctcttcaccaaggttcagcagatccgccgcgccgaacccaacgtgctgctgctggacgccggcgaccagtaccagggcactatctggttcaccgtgtacaagggcgccgaggtggcgcacttcatgaacgccctgcgctacgatgccatggcactgggaaatcatgaatttgataatggtgtggaaggactgatcgagccactcctcaaagaggccaaatttccaattctgagtgcaaacattaaagcaaaggggccactagcatctcaaatatcaggactttatttgccatataaagttcttcctgttggtgatgaagttgtgggaatcgttggatacacttccaaagaaaccccttttctctcaaatccagggacaaatttagtgtttgaagatgaaatcactgcattacaacctgaagtagataagttaaaaactctaaatgtgaacaaaattattgcactgggacattcgggttttgaaatggataaactcatcgctcagaaagtgaggggtgtggacgtcgtggtgggaggacactccaacacatttctttacacaggcaatccaccttccaaagaggtgcctgctgggaagtacccattcatagtcacttctgatgatgggcggaaggttcctgtagtccaggcctatgcttttggcaaatacctaggctatctgaagatcgagtttgatgaaagaggaaacgtcatctcttcccatggaaatcccattcttctaaacagcagcattcctgaagatccaagcataaaagcagacattaacaaatggaggataaaattggataattattctacccaggaattagggaaaacaattgtctatctggatggctcctctcaatcatgccgctttagagaatgcaacatgggcaacctgatttgtgatgcaatgattaacaacaacctgagacacacggatgaaatgttctggaaccacgtatccatgtgcattttaaatggaggtggtatccggtcgcccattgatgaacgcaacaatggcacaattacctgggagaacctggctgctgtattgccctttggaggcacatttgacctagtccagttaaaaggttccaccctgaagaaggcctttgagcatagcgtgcaccgctacggccagtccactggagagttcctgcaggtgggcggaatccatgtggtgtatgatctttcccgaaaacctggagacagagtagtcaaattagatgttctttgcaccaagtgtcgagtgcccagttatgaccctctcaaaatggacgaggtatataaggtgatcctcccaaacttcctggccaatggtggagatgggttccagatgataaaagatgaattattaagacatgactctggtgaccaagatatcaacgtggtttctacatatatctccaaaatgaaagtaatttatccagcagttgaaggtcggatcaagttttccacaggaagtcactgccatggaagcttttctttaatatttctttcactttgggcagtgatctttgttttataccaatagccaaaaattctccttgcctttaatgtgtgaaactgcattttttcaagtgagattcaaatctgccttttaggacctggctttgtgacagcaaaaaccatctttacaggctcctagaagctgaaggttagagcattataaaatgaagagacagacatgattactcagggtcagcaacctagtgagttagaaaaaaaattaacatagggccctataaggagaaagccaactatgttaagtttacgtgtccaaattttaatgaaattttactaacaattttaaaccatatttttcttcttcatatccatttctaatccatcaaacagcttatgtttacataaaattttatcattcacaaggaagttttaagcacactgtctcatttgatatccacaacttatttttggtaggaaagagagatgtttttcccacctgtcagatgaaaaaactgaagctcaaaaagggttgacttgaccatacagctaatgctgacagatccaagacctagacctaggtcttttgaactcaagtccagcattctcaactatatcaagttactgttcagaatacttaatatctcctctcttcataattatcaatagccccaagctcatggatgacaaatctctgctttatttcttgtctctattttttcactttatagctcctgttataatagcaagtttaatggtataaacacaggataccatcctctcttgcaacacccatgtgcctttgatgagtcaggtagcaagctgtagtagataatgagaaaggccagaggctgcaaagacagtcaaaggacacgagagaaaggaaggggaagaacaggactccaggactgttttatattatagaaaagcaagagctaaagagcatttacacatgttaaacagatacttgttaagcatagtgcctgacacacggcattagctgttattttatgagattccatcagctctgcctctgtcctctttcttctaacatgaaggtatcatgagaagagaaccttctaacataagctgtaattctaaacctgcacttgtccctctccagcaagaggctagcactgaattcattctactcatactacacacccagttatggaatgtccagagttctcgaagaaaataaatgactttaggaagaggtatacattttttaagtcgctctgcctccaaatctgaacagtcactgtaaatcattcttaagcccagatatgagaacttctgctggaaagtgggaccctctgagtgggtggtcagaaaatacccatgctgatgaaatgacctatgcccaaagaacaaatacttaacgtgggagtggaaccacatgagcctgctcagctctgcataagtaattcaagaaatgggaggcttcaccttaaaaacagtgtgcaaatggcagctagaggttttgataggaagtatgtttgtttcttagtgtttacaaatattaagtactcttgatacaaaatatacttttaaacttcataacctttttataaaagttgttgcagcaaaataatagcctcggttctatgcatatatggattgctataaaaaatgtcaataagattgtacaaggaaaattagagaaagtcacatttagggtttattttttacacttggccagtaaaatagggtaaatcctattagaaattttttaaagaactttttttaagtttcctaaatctgtgtgtgtattgtgaagtggtataagaaatgactttgaaccactttgcaattgtagattcccaacaataaaattgaagat

SEQ ID NO: 499 - DNA, 442 bp, Homo sapiens
  misc_feature (1)..(442): "n" represents an unknown nucleotide
ttttttttttagcttatcttcaattttattgttgggaatctacaattgcnaagtggttcaaagtcatttcttataccacttcacaatacacacacagatttaggaaacttaaaaaaagttctttaaaaaattctaataggatttaccctattttactggccaagtgtaaaanntaaaccctaaatgtgactttctctaattttccttgtacaatcttattgacattttttatagctaatccatatatgcatagaaccgaggctattattttgctgcaacaacttttataaaaaggntatgaagnttaaaagtatattttgtatcaggagtacttaatatttggtaaacactagggaaccaaaccatacttccctatccaaacctctggctgnccatttggcacactgtttttaggggtgaggcctccccatttcttggaatt

SEQ ID NO: 500 - DNA, 393 bp, Homo sapiens
  misc_feature (1)..(393): "n" represents an unknown nucleotide
tggtaggaaagagagatgtttttccaccttgtcagatgaaaaaacttgaagctcaaaaagggttgacgttgaccatacagctaatgctgacagatccaagacctagacctaggtcttttgaactcaagtccagcattctcaactatatcaagttactgttcagaatacttaatatctcctctcttcataattatcaatagccccaagctcatgggatgacaaatctctgctttatttcttgtctctattttttcactttatagctcctgttataatagcaagnttaatgggataaanacaggggnacccatcctctcttgccaacaccccatgtgcctttggatgagtcagggtaggcaaggctgtaggtagggntaatgnggaaagggncca

SEQ ID NO: 501 - DNA, 1703 bp, Homo sapiens
aagcttgtggcttcttctccttactcttcctccttggtgtctctatgttagagggccgttagcatctgctggggcctggtcgcattcaccctgctctgccactcactggctgtgtgactctggacaaattaacttctctggacctggcagtttctcctctctacaatgagaatactggagagtccttatcttatgggttgctacagaattaagtgacatctcacacacaacacacttcctacagtccctgttacacgctaaaagtactcaactagcttcggatacgtcatcagcaaccaccccacgggttactgtgatgctgcacaattattaagccctggctgctacagagttgtaacctgtctgcacttccaaccggcgccgcaagcagcattcccagtcccgctttcacccgcgcgctaacggctcaggttcgagtacaggacaggagggaggggagctgtgcacacggcggaggcgcacggcgtgggcacccagcacccggtacactgtgtcctcccgctgcacccagccccttcagcccgaggcgtccccgaggcgcaagtgggccgccttcagggaactgaccgcccgcggcccgtgtgcagagccgggtgcgcccggcccagtgcgcgcggccgggtgtttcgcttggagccgcaagtgacttctagcgcggggcgtgtgcaggcacggccggggcggggcttttgcactcgtcccggctctttctagctataaacactgcttgccgcgctgcactccaccacgcctcctccaagtcccagcgaacccgcgtgcaacctgtcccgactctagccgcctcttcagcacgccatggatcccaactgctcctgcgccgccggtaagaggctggggatgcccagtgtagactgtagcgctagagaagcaatttctgacccctctttctttctctggtcactcaatttcaggcacaggagttgctcttcccaaagagttttggtatctttctctccattctaggttattcggagccccctttttaccgttaaggagatctgagttaatggcttgctcaagttcccaggaatcggttgtggactgaggaactcggccccgggtcttagtacgcgtcccttgttcaggtatccagggagttctcacctctgtcttttctccttcaggtgactcctgcacctgcgccggctcctgcaaatgcaaagagtgcaaatgcacctcctgcaagaaaagtaagtgggatcctctctttcctctaccccttccctgtcctccagcctgtcccctctccaccatcctcaggggaattaaagcagtctggggatgccccattgcgcggaaattgttgcctcctcagtgatcttatcagggagagcaggaatccttattcccggtgtcgctagtactcatctctgcgcctcctgtctgcccccaggctgctgctcctgctgccctgtgggctgtgccaagtgtgcccagggctgcatctgcaaaggggcgtcggacaagtgcagctgctgcgcctgatgctgggacagccccgctcccagatgtaaagaacgcgacttccacaaacctggattttttatgtacaaccctgaccgtgaccgtttgctatattcctttttctataaaataatgtgaatgataataaaacagctttgacttgattctgtctctggttttctttatatgccttaaaa

SEQ ID NO: 502 - DNA, 301 bp, Homo sapiens
  misc_feature (1)..(301): "n" represents an unknown nucleotide
tcaagtcaaagctgttttattatcattcacattatttcatagaaaaaggaatatagcaaacggtcacggtcagggttgtacataaaaaatccaggtttgtggaagtcgcgttctttacatctgggagcggggctgtcccagcatcaggcgcanagctgcacttgtccgacgcccctttgcagatgcagccctgggcacacttggcacagcccacaggnagncaggagcagcagcttttcttgcaggaggtgcatttgcactctttgcatttgcaggagccggcgcaggtgcaggagtcacc

SEQ ID NO: 503 - DNA, 320 bp, Homo sapiens
ccaactgctcctgcgccgccggtgactcctgcacctgcgccggctcctgcaaatgcaaagagtgcaaatgcacctcctgcaagaaaagctgctgctcctgctgccctgtgctgccgcaagtgtgcccagggctgcatctgcaaaggggcgtcggacaagtgcagctgctgcgcctgatgctgggacagccccgctcccagatgtaaagaacgcgacttccacaaacctggattttttatgtacaaccctgaccgtgaccgtttgctatattcctttttctatgaaataatgtgaatgataataaaacagctttgacttga

SEQ ID NO: 504 - DNA, 431 bp, Homo sapiens
ttttttacctatccctggagcaagtaataggaagagaatgggcaaactggttgcacgagagaaaagagaatggagttgggagcaacacatgaacttgcgttataacattctgctgtccagatctgccctactgtgctggtggtcggtctgtccctcttctcattagccactcacaggagaggtgcttgtgcactctgattcacaggggatgaactcaggatctcaaaagacatacaaaaactagaggtatgtatcacttaaatagctacgaaactcacaccgtgatctcccttctgacacacatctgcgccatctcttccaacataaaataaactgtttcaatggtttgtcagttatttttcaaatcactaaaatgtacagtcatccaccaacaatttaagaaagaacctaagaggcaaatcactggggac

SEQ ID NO: 505 - DNA, 3314 bp, Homo sapiens
ggaggcaggcggtgccgcggcgccgggacccgactcatccggtgcttgcgtgtggtggtgagcgcagcgccgaggatgaggaggtgcaacagcggctccgggccgccgccgtcgctgctgctgctgctgctgtggctgctcgcggttcccggcgctaacgcggccccgcggtcggcgctctattcgccttccgacccgctgacgctgctgcaggcggacacggtgcgcggcgcggtgctgggctcccgcagcgcctgggccgtggagttcttcgcctcctggtgcggccactgcatcgccttcgccccgacgtggaaggcgctggccgaagacgtcaaagcctggaggccggccctgtatctcgccgccctggactgtgctgaggagaccaacagtgcagtctgcagagacttcaacatccctggcttcccgactgtgaggttcttcaaggcctttaccaagaacggctcgggagcagtatttccagtggctggtgctgacgtgcagacgctgcgggagaggctcattgacgccctggagtcccatcatgacacgtggcccccagcctgtcccccactggagcctgccaagctggaggagattgatggattctttgcgagaaataacgaagagtacctggctctgatctttgaaaagggaggctcctacctgggtagagaggtggctctggacctgtcccagcacaaaggcgtggcggtgcgcagggtgctgaacacagaggccaatgtggtgagaaagtttggtgtcaccgacttcccctcttgctacctgctgttccggaatggctctgtctcccgagtccccgtgctcatggaatccaggtccttctataccgcttacctgcagagactctctgggctcaccagggaggctgcccagaccacagttgcaccaaccactgctaacaagatagctcccactgtttggaaattggcagatcgctccaagatctacatggctgacctggaatctgcactgcactacatcctgcggatagaagtgggcaggttcccggtcctggaagggcagcgcctggtggccctgaaaaagtttgtggcagtgctggccaagtatttccctggccggcccttagtccagaacttcctgcactccgtgaatgaatggctcaagaggcagaagagaaataaaattccctacagtttctttaaaactgccctggacgacaggaaagagggtgccgttcttgccaagaaggtgaactggattggctgccaggggagtgagccgcatttccggggctttccctgctccctgtgggtcctcttccacttcttgactgtgcaggcagctcggcaaaatgtagaccactcacaggaagcagccaaggccaaggaggtcctcccagccatccgaggctacgtgcactacttcttcggctgccgagactgcgctagccacttcgagcagatggctgctgcctccatgcaccgggtggggagtcccaacgccgctgtcctctggctctggtctagccacaacagggtcaatgctcgccttgcaggtgcccccagcgaggacccccagttccccaaggtgcagtggccaccccgtgaactttgttctgcctgccacaatgaacgcctggatgtgcccgtgtgggacgtggaagccaccctcaacttcctcaaggcccacttctccccaagcaacatcatcctggacttccctgcagctgggtcagctgcccggagggatgtgcagaatgtggcagccgccccagagctggcgatgggagccctggagctggaaagccggaattcaactctggaccctgggaagcctgagatgatgaagtcccccacaaacaccaccccacatgtgccggctgagggacctgaggcaagtcgacccccgaagctgcaccctggcctcagagctgcaccaggccaggagcctcctgagcacatggcagagcttcagaggaatgagcaggagcagccgcttgggcagtggcacttgagcaagcgagacacaggggctgcattgctggctgagtccagggctgagaagaaccgcctctggggccctttggaggtcaggcgcgtgggccgcagctccaagcagctggtcgacatccctgagggccagctggaggcccgagctggacggggccgaggccagtggctgcaggtgctgggagggggcttctcttacctggacatcagcctctgtgtggggctctattccctgtccttcatgggcctgctggccatgtacacctacttccaggccaagataagggccctgaagggccatgctggccaccctgcagcctgaaccacctggggaggaggcgggagagggagctgccatctctaggcacctcaagccccctgaccccattccctcccctcccaccccttgctccttgtctggcctagaagtgtgggaaattcaggaaaacgagttgctccagtgaagcttcttggggttgctaggacagagagctcctttgacacaaaagacaggagcagggtccaggttcccctgctgtgcagggagggcagccccgggcagtgggcatagggcagctcagtccctggcctcttagcaccacattcctgtttttcagcttatttgaagtcctgcctcattctcactggagcctcagtctctcctgcttggtcttggccctcaactggggcaagtgaagccagaggagggtcccccagctgggtgggctggaatggaactcctcactagctgctggggctccgcccaccctgctcccttccggacaatgaagaagcctttgcaccctgggaggaaggaccaccccgggccctctatgcctggccagcctccagctcctcagacctcctgggtggggtttggcttcagggtggggtttggaagcttctggaagtcgtgctggtctcccaggtgaggcaagccatggttgctgggctgtagggtgagtggcttgcttggtgggacctgacgagttggtggcatgggaaggatgtgggtctctagtgccttgccctggcttagctgcaggagaagatggctgctttcacttccccccattgagctctgctccctctgagcctggtcttttgtccttttttattttggtctccaagatgaatgctcatctttggagggtgccaggtagaagctagggaggggagtgtcttctctctccaggtttcaccttccagtgtgcagaagttagaagggtctggcgggggcagtgccttacacatgcttgattcccacgctaccccctgccttgggaggtgtgtggaataaattatttttgttaaggc

SEQ ID NO: 506 - DNA, 354 bp, Homo sapiens
tgccttaacaaaaataatttattccacacacctcccaaggcagggggtagcgtgggaatcaagcatgtgtaaggcactgcccccgccagacccttctaacttctgcacactggaaggtgaaacctggagagagaagacactcccctccctagcttctacctggcaccctccaaagatgagcattcatcttggagaccaaaataaaaaaggacaaaagaccaggctcagagggagcagagctcaatggggggaagtgaaagcagccatcttctcctgcagctaagccagggcaaggcactagagacccacatccttcccatgccaccaactcgtcaggtcccaccaagcaagcca

SEQ ID NO: 507 - DNA, 265 bp, Homo sapiens
ggacagaggagcaaggtttaaatttgttattgtgtattatgttgttcaaatgcattttgggggtttttaatctttgtgacaggaaagccctcccccttccccttctgtgtcacagttcttggtgactgtcccaccgggagcctccccctcagatgatctctccacggtagcacttgaccttttcgacgcttaacctttccgctgtcgccccaggccctccctggactccctgtgggggtgagccatccctggggccccctccacg

SEQ ID NO: 508 - DNA, 3160 bp, Homo sapiens
cctcccctcgcccggcgcggtcccgtccgcctctcgctcgcctcccgcctcccctcggtcttccgaggcgcccgggctcccggcgcggcggcggagggggcgggcaggccggcgggcggtgatgtggcaggactctttatgcgctgcggcaggatacgcgctcggcgctgggacgcgactgcgctcagttctctcctctcggaagctgcagccatgatggaagtttgagagttgagccgctgtgaggcgaggccgggctcaggcgagggagatgagagacggcggcggccgcggcccggagcccctctcagcgcctgtgagcagccgcgggggcagcgccctcggggagccggccggcctgcggcggcggcagcggcggcgtttctcgcctcctcttcgtcttttctaaccgtgcagcctcttcctcggcttctcctgaaagggaaggtggaagccgtgggctcgggcgggagccggctgaggcgcggcggcggcggcggcggcacctcccgctcctggagcgggggggagaagcggcggcggcggcggccgcggcggctgcagctccagggagggggtctgagtcgcctgtcaccatttccagggctgggaacgccggagagttggtctctccccttctactgcctccaacacggcggcggcggcggcggcacatccagggacccgggccggttttaaacctcccgtccgccgccgccgcaccccccgtggcccgggctccggaggccgccggcggaggcagccgttcggaggattattcgtcttctccccattccgctgccgccgctgccaggcctctggctgctgaggagaagcaggcccagtcgctgcaaccatccagcagccgccgcagcagccattacccggctgcggtccagagccaagcggcggcagagcgaggggcatcagctaccgccaagtccagagccatttccatcctgcagaagaagccccgccaccagcagcttctgccatctctctcctcctttttcttcagccacaggctcccagacatgacagccatcatcaaagagatcgttagcagaaacaaaaggagatatcaagaggatggattcgacttagacttgacctatatttatccaaacattattgctatgggatttcctgcagaaagacttgaaggcgtatacaggaacaatattgatgatgtagtaaggtttttggattcaaagcataaaaaccattacaagatatacaatctttgtgctgaaagacattatgacaccgccaaatttaattgcagagttgcacaatatccttttgaagaccataacccaccacagctagaacttatcaaacccttttgtgaagatcttgaccaatggctaagtgaagatgacaatcatgttgcagcaattcactgtaaagctggaaagggacgaactggtgtaatgatatgtgcatatttattacatcggggcaaatttttaaaggcacaagaggccctagatttctatggggaagtaaggaccagagacaaaaagggagtaactattcccagtcagaggcgctatgtgtattattatagctacctgttaaagaatcatctggattatagaccagtggcactgttgtttcacaagatgatgtttgaaactattccaatgttcagtggcggaacttgcaatcctcagtttgtggtctgccagctaaaggtgaagatatattcctccaattcaggacccacacgacgggaagacaagttcatgtactttgagttccctcagccgttacctgtgtgtggtgatatcaaagtagagttcttccacaaacagaacaagatgctaaaaaaggacaaaatgtttcacttttgggtaaatacattcttcataccaggaccagaggaaacctcagaaaaagtagaaaatggaagtctatgtgatcaagaaatcgatagcatttgcagtatagagcgtgcagataatgacaaggaatatctagtacttactttaacaaaaaatgatcttgacaaagcaaataaagacaaagccaaccgatacttttctccaaattttaaggtgaagctgtacttcacaaaaacagtagaggagccgtcaaatccagaggctagcagttcaacttctgtaacaccagatgttagtgacaatgaacctgatcattatagatattctgacaccactgactctgatccagagaatgaaccttttgatgaagatcagcatacacaaattacaaaagtctgaatttttttttatcaagagggataaaacaccatgaaaataaacttgaataaactgaaaatggacctttttttttttaatggcaataggacattgtgtcagattaccagttataggaacaattctcttttcctgaccaatcttgttttaccctatacatccacagggttttgacacttgttgtccagttgaaaaaaggttgtgtagctgtgtcatgtatatacctttttgtgtcaaaaggacatttaaaattcaattaggattaataaagatggcactttcccgttttattccagttttataaaaagtggagacagactgatgtgtatacgtaggaattttttccttttgtgttctgtcaccaactgaagtggctaaagagctttgtgatatactggttcacatcctacccctttgcacttgtggcaacagataagtttgcagttggctaagagaggtttccgaaaggttttgctaccattctaatgcatgtattcgggttagggcaatggaggggaatgctcagaaaggaaataattttatgctggactctggaccatataccatctccagctatttacacacacctttctttagcatgctacagttattaatctggacattcgaggaattggccgctgtcactgcttgttgtttgcgcatttttttttaaagcatattggtgctagaaaaggcagctaaaggaagtgaatctgtattggggtacaggaatgaaccttctgcaacatcttaagatccacaaatgaagggatataaaaataatgtcataggtaagaaacacagcaacaatgacttaaccatataaatgtggaggctatcaacaaagaatgggcttgaaacattataaaaattgacaatgatttattaaatatgttttctcaattgtaaaaaaaaaa

SEQ ID NO: 509 - DNA, 543 bp, Homo sapiens
  misc_feature (1)..(543): "n" represents an unknown nucleotide
ttttttttttacaattgagaaaacatatttaataaatcattgtcaatttttataatgtttcaagcccattctttgttgatagcctccacatttatatggttaagtcattgttgctgtgtttcttacctatgacattatttttatatcccttcatttgtggatcttaagatgttgcagaaggttcattcctgtaccccaatacagattcacttcctttagctgccttttctagcaccaatatgctttaaaaaaaaatgcgcaaacaacaangcagtgacagcggccaattcctcgaatgtccagattaataactgtagcatgctaaagaaaggtgtgtgtaaatagctcggagatgggtatatggtccagagtccagcataaaattatttcctttctgagcattccctccattgcccctaacccgaatacatgcattagaatggtagcanaacccttncggaaacctctcttagccaactgcaaacttatctgttgccacaagtgcaaagggggtaggatgtgaanccagtatattccncaaag

SEQ ID NO: 510 - DNA, 281 bp, Homo sapiens
  misc_feature (1)..(281): "n" represents an unknown nucleotide
aagctgtgtcatgtatatacctttttgtgtcaaaaggacatttaaaattcaattaggattaataaagatggcactttcccgttttattccagttttataaaaagtggagacagactgatgtgtatacgtaggaattttttccttttgtgttctgtcaccaactgaagtggctaaagagctttgtgatatactggttcacatcctacccctttgcacttgtggcaacagataagtttgcagttggctaaagagaggtttnccgaagggttttggctacattc

SEQ ID NO: 511 - DNA, 1514 bp, Homo sapiens
cgaggcgtagcggaagttactgcagccgcggtgttgtgctgtcgggaaggggaaggatttgtaaaccccggagcgaggttctgcttacccgaggccgctgctgtgcggagacccccgggtgaagccaccgtcatcatgtctgaccaggaggcaaaaccttcaactgaggacttgggggataagaaggaaggtgaatatattaaactcaaagtcattggacaggatagcagtgagattcacttcaaagtgaaaatgacaacacatctcaagaaactcaaagaatcatactgtcaaagacagggtgttccaatgaattcactcaggtttctctttgagggtcagagaattgctgataatcatactccaaaagaactgggaatggaggaagaagatgtgattgaagtttatcaggaacaaacggggggtcattcaacagtttagatattctttttattttttttcttttccctcaatccttttttatttttaaaaatagttcttttgtaatgtggtgttcaaaacggaattgaaaactggcaccccatctctttgaaacatctggtaatttgaattctagtgctcattattcattattgtttgttttcattgtgctgatttttggtgatcaagcctcagtccccttcatattaccctctcctttttaaaaattacgtgtgcacagagaggtcacctttttcaggacattgcattttcaggctttgttctagcatgtgattacttcactcctggactgtgactttcagtgggagatggaagtttttgtggtgataaataagatcgaccaatgcaagtgttcataatgactttccaattggccctgacagagaactgaactgtggaaaaatgacctttccttaacttgaagctacttttaaaattttgagggtctggaccaaaagaagaggaatatcaggttgaagtcaagatgacagataaggtgagagtaatgactaactccaaagatggcttcactgaagaaaaggcattttaagattttttaaaaatcttgtcagaagatcccagaaaagttctaattttcattagcaattaataaagctatacatgcagaaatgaatacaacagaacactgctctttttgattttatttgtactttttggcctgggatatgggttttaaatggacattgtctgtaccagcttcattaaaataaacaatatttgtcaaaaatcgtactaatgcttattttattttaattgtatagaaagaaaaaaatgcctaaaataaggttttcttgcataaatactggaaattgcacatggtacaaattttttcttcattactgtacagggatgatgttaatgactttggagcactgaaagttactgaagtgccttctgaatcaaggatttaattaaggccacaatacctttttaatactcagtgttctgttttttttaaaaacttgatattcccgtatggtgcatatttgatacaggtacccaatcatgttggataaatgggcatgccagcc

SEQ ID NO: 512 - DNA, 401 bp, Homo sapiens
tttttttttttttttttttttttttaatttttggcatgcccgtttattcaacatgattaggtaactgtatcatatatgcaccatacaggaatatcaagtttttaaaaaaacagaacactgagtattaaaaaggtattgtggccttaattaaatccttgattcagaaggcacttcagtaactttcagtgcttcaaagtcattaacatcatcactgtacagtaatgaagaaaaaatttgtaccatgtgcaatttccagtatttatgcaagaaaaccttattttaggcatttttttctttctatacaattaaaataaaataagcattagtatgatttttacaaatattgtttattttaatgaagctggtacagacaatgtccatttaaaacccatatcccaggc

SEQ ID NO: 513 - DNA, 449 bp, Homo sapiens
gttgtgctgtggggaagggagaaggatttgtaaaccccggagcgaggttctgcttacccgaggccgctgctgtgcggagacccccgggtgaagccaccgtcatcatgtctgaccaggaggcaaaaccttcaactgaggacttgggggataagaaggaaggtgaatatattaaactcaaagtcattggacaggatagcagtgagattcacttcaaagtgaaaatgacaacacatctcaagaaactcaaagaatcatactgtcaaagacagggtgttccaatgaattcactcaggtttctctttgagggtcagagaattgctgataatcatactccaaaagaactgggaatggaggaagaagatgtgattgaagtttatcaggaacaaacggggggtcattcaacagtttagatattctttttattttttttcttttccctcaatcctttt

SEQ ID NO: 514 - DNA, 465 bp, Homo sapiens
  misc_feature (1)..(465): "n" represents an unknown nucleotide
cttgatctgtacagatatacttctgatattccatccactaaattattttccaccatattcacccaatagttacagaatattgccagaccattcatcttctttttaattcccttcagattctaagtgagaaggaactctcattccctaaagattttttatatcaaggggacagtaatgcaaagaatccctttctgaggcttttgctcttacaaagatacaacacaccatagtaccaaaggacacacgtccccaccttgttacatcagattttaanatggcaataaatgccttgaaaaatacacattttaaacttaaaagggtattgaaagccattcttctccaggtaattaccaattacccctaagggtgggtagctgtaaaaccacttggatcagacnaaagtcttggncttttcaaaagttaaagttaagtcagggggcagttgattctgctttccttactggt

SEQ ID NO: 515 - DNA, 575 bp, Homo sapiens
  misc_feature (1)..(575): "n" represents an unknown nucleotide
cgtttcttctttctagagcagttggccaagcagaaaaaaaagtgtctcaaaggagctttctcaatgtcttcccacaaatggtcccaattaagaaattccatacttctctcagatgggaacagtaaagaaagcagaatcaactgcccctgacttaactttaacttttgaaaagaccaagacttttgtctgatcaagtggttttacagctaccacccttaggggtaattggtaattacctggagaagaatggctttcaatacccttttaagtttaaaatgtgtatttttcaaggcatttattgccatattaaaatctgatgtaacaaggtggggacgtgtgtcctttggtactatggtgtgttgtactttgtaagagcaaaagcctcagaaagggattgctttgcattactgtccccttgatataaaaaactttagggaatgagagtcctctcacttagaactgaagggaattaaaagaagatgaatggctggcaatatctgtactattgggtgaatatggtggaaatattagtggatggatacagaagttactgtcagancagaaaaaaaaaaaaa

SEQ ID NO: 516 - DNA, 2840 bp, Homo sapiens
cagcggccgctgaattctagggcgggttcgcgccccgaaggctgagagctggcgctgctcgtgccctgtgtgccagacggcggagctccgcggccggaccccgcggccccgctttgctgccgactggagtttgggggaagaaactctcctgcgccccagaagatttcttcctcggcgaagggacagcgaaagatgagggtggcaggaagagaaggcgctttctgtctgccggggtcgcagcgcgagagggcagtgccatgttcctctccatcctagtggcgctgtgcctgtggctgcacctggcgctgggcgtgcgcggcgcgccctgcgaggcggtgcgcatccctatgtgccggcacatgccctggaacatcacgcggatgcccaaccacctgcaccacagcacgcaggagaacgccatcctggccatcgagcagtacgaggagctggtggacgtgaactgcagcgccgtgctgcgcttcttcttctgtgccatgtacgcgcccatttgcaccctggagttcctgcacgaccctatcaagccgtgcaagtcggtgtgccaacgcgcgcgcgacgactgcgagcccctcatgaagatgtacaaccacagctggcccgaaagcctggcctgcgacgagctgcctgtctatgaccgtggcgtgtgcatttcgcctgaagccatcgtcacggacctcccggaggatgttaagtggatagacatcacaccagacatgatggtacaggaaaggcctcttgatgttgactgtaaacgcctaagccccgatcggtgcaagtgtaaaaaggtgaagccaactttggcaacgtatctcagcaaaaactacagctatgttattcatgccaaaataaaagctgtgcagaggagtggctgcaatgaggtcacaacggtggtggatgtaaaagagatcttcaagtcctcatcacccatccctcgaactcaagtcccgctcattacaaattcttcttgccagtgtccacacatcctgccccatcaagatgttctcatcatgtgttacgagtggcgttcaaggatgatgcttcttgaaaattgcttagttgaaaaatggagagatcagcttagtaaaagatccatacagtgggaagagaggctgcaggaacagcggagaacagttcaggacaagaagaaaacagccgggcgcaccagtcgtagtaatccccccaaaccaaagggaaagcctcctgctcccaaaccagccagtcccaagaagaacattaaaactaggagtgcccagaagagaacaaacccgaaaagagtgtgagctaactagtttccaaagcggagacttccgacttccttacaggatgaggctgggcattgcctgggacagcctatgtaaggccatgtgccccttgccctaacaactcactgcagtgctcttcatagacacatcttgcagcatttttcttaaggctatgcttcagtttttctttgtaagccatcacaagccatagtggtaggtttgccctttggtacagaaggtgagttaaagctggtggaaaaggcttattgcattgcattcagagtaacctgtgtgcatactctagaagagtagggaaaataatgcttgttacaattcgacctaatatgtgcattgtaaaataaatgccatatttcaaacaaaacacgtaatttttttacagtatgttttattaccttttgatatctgttgttgcaatgttagtgatgttttaaaatgtgatgaaaatataatgtttttaagaaggaacagtagtggaatgaatgttaaaagatctttatgtgtttatggtctgcagaaggatttttgtgatgaaaggggattttttgaaaaattagagaagtagcatatggaaaattataatgtgtttttttaccaatgacttcagtttctgtttttagctagaaacttaaaaacaaaaataataataaagaaaaataaataaaaaggagaggcagacaatgtctggattcctgttttttggttacctgatttccatgatcatgatgcttcttgtcaacaccctcttaagcagcaccagaaacagtgagtttgtctgtaccattaggagttaggtactaattagttggctaatgctcaagtattttatacccacaagagaggtatgtcactcatcttacttcccaggacatccaccctgagaataatttgacaagcttaaaaatggccttcatgtgagtgccaaattttgtttttcttcatttaaatattttctttgcctaaatacatgtgagaggagttaaatataaatgtacagagaggaaagttgagttccacctctgaaatgagaattacttgacagttgggatactttaatcagaaaaaaagaacttatttgcagcattttatcaacaaatttcataattgtggacaattggaggcatttattttaaaaaacaattttattggccttttgctaacacagtaagcatgtattttataaggcattcaataaatgcacaacgcccaaaggaaataaaatcctatctaatcctactctccactacacagaggtaatcactattagtattttggcatattattctccaggtgtttgcttatgcacttataaaatgatttgaacaaataaaactaggaacctgtatacatgtgtttcataacctgcctcctttgcttggccctttattgagataagttttcctgtcaagaaagcagaaaccatctcatttctaacagctgtgttatattccatagtatgcattactcaacaaactgttgtgctattggatacttaggtggtttcttcactgacaatactgaataaacatctcaccggaattc

SEQ ID NO: 517 - DNA, 448 bp, Homo sapiens
gtttgaaatatggcatttattttacaatgcacatattaggtcgaattgtaacaagcattattttccctactcttctagagtatgcacacaggttactctgaatgcaatgcaataagccttttccaccagctttaactcaccttctgtaccaaagggcaaacctaccactatggcttgtgatggcttacaaagaaaaactgaagcatagccttaagaaaaatgctgcaagatgtgtctatgaagagcactgcagtgagttgttagggcaaggggcacatggccttacataggctgtcccaggcaatgcccagcctcatcctgtaaggaagtcggaagtctccgctttggaaactagttagctcacactcttttcgggtttgttttcttctgggcactcctagttttaatgttcttcttgggactggctggtttgggagcaggagtcttt

SEQ ID NO: 518 - DNA, 392 bp, Homo sapiens
tgggaagagaggctgcaggaacagcggagaacagttcaggacaagaagaaaacagccgggcgcaccagtcgtagtaatccccccaaaccaaagggaaagactcctgctcccaaaccagccagtcccaagaagaacattaaaactaggagtgcccagaagaaaacaaacccgaaaagagtgtgagctaactagtttccaaagcggagacttccgacttccttacaggatgaggctgggcattgcatgggacagcctatgtaaggccatgtgccccttgccctaacaactcactgcagtgctcttcatagacacatcttgcagcatttttcttaaggctatgcttcagtttttctttgtaagccatcacaagccatagtggtaggtttgccttt

SEQ ID NO: 519 - DNA, 7265 bp, Homo sapiens
catagagccagcgggcgcgggcgggacgggcgccccgcggccggacccagccagggcaccacgctgcccggccctgcgccgccaggcacttctttccggggctcctagggacgccagaaggaagtcaacctctgctgcttctccttggcctgcgttggaccttcctttttttgttgtttttttttgtttttcccctttcttccttttgaattaactggcttcttggctggatgttttcaacttctttcctggctgcgaacttttccccaattgttttccttttacaacagggggagaaagtgctctgtggtccgaggcgagccgtgaagttgcgtgtgcgtggcagtgtgcgtggcaggatgtgcgtgcgtgtgtaacccgagccgcccgatctgtttcgatctgcgccgcggagccctccctcaaggcccgctccacctgctgcggttacgcggcgctcgtgggtgttcgtgcctcggagcagctaaccggcgggtgctgggcgacggtggaggagtatcgtctcgctgctgcccgagtcagggctgagtcacccagctgatgtagacagtggctgccttccgaagagtgcgtgtttgcatgtgtgtgactctgcggctgctcaactcccaacaaaccagaggaccagccacaaacttaaccaacatccccaaacccgagttcacagatgtgggagagctgtagaaccctgagtgtcatcgactgggccttcttatgattgttgttttaagattagctgaagatctctgaaacgctgaattttctgcactgagcgttttgacagaattcattgagagaacagagaacatgacaagtacttctagctcagcactgctccaactactgaagctgattttcaaggctacttaaaaaaatctgcagcgtacattaatggatttctgttgtgtttaaattctccacagattgtattgtaaatattttatgaagtagagcatatgtatatatttatatatacgtgcacatacattagtagcactacctttggaagtctcagctcttgcttttcgggactgaagccagttttgcatgataaaagtggccttgttacgggagataattgtgttctgttgggactttagacaaaactcacctgcaaaaaactgacaggcattaactactggaacttccaaataatgtgtttgctgatcgttttactcttcgcataaatattttaggaagtgtatgagaattttgccttcaggaacttttctaacagccaaagacagaacttaacctctgcaagcaagattcgtggaagatagtctccactttttaatgcactaagcaatcggttgctaggagcccatcctgggtcagaggccgatccgcagaaccagaacgttttcccctcctggactgttagtaacttagtctccctcctcccctaaccacccccgcccccccccaccccccgcagtaataaaggcccctgaacgtgtatgttggtctcccgggagctgcttgctgaagatccgcgcccctgtcgccgtctggtaggagctgtttgcagggtcctaactcaatcggcttgttgtgatgcgtatccccgtagatgccagcacgagccgccgcttcacgccgccttccaccgcgctgagcccaggcaagatgagcgaggcgttgccgctgggcgccccggacgccggcgctgccctggccggcaagctgaggagcggcgaccgcagcatggtggaggtgctggccgaccacccgggcgagctggtgcgcaccgacagccccaacttcctctgctccgtgctgcctacgcactggcgctgcaacaagaccctgcccatcgctttcaaggtggtggccctaggggatgttccagatggcactctggtcactgtgatggctggcaatgatgaaaactactcggctgagctgagaaatgctaccgcagccatgaagaaccaggttgcaagatttaatgacctcaggtttgtcggtcgaagtggaagagggaaaagcttcactctgaccatcactgtcttcacaaacccaccgcaagtcgccacctaccacagagccatcaaaatcacagtggatgggccccgagaacctcgaagacatcggcagaaactagatgatcagaccaagcccgggagcttgtccttttccgagcggctcagtgaactggagcagctgcggcgcacagccatgagggtcagcccacaccacccagcccccacgcccaaccctcgtgcctccctgaaccactccactgcctttaaccctcagcctcagagtcagatgcaggatacaaggcagatccaaccatccccaccgtggtcctacgatcagtcctaccaatacctgggatccattgcctctccttctgtgcacccagcaacgcccatttcacctggacgtgccagcggcatgacaaccctctctgcagaactttccagtcgactctcaacggcacccgacctgacagcgttcagcgacccgcgccagttccccgcgctgccctccatctccgacccccgcatgcactatccaggcgccttcacctactccccgacgccggtcacctcgggcatcggcatcggcatgtcggccatgggctcggccacgcgctaccacacctacctgccgccgccctaccccggctcgtcgcaagcgcagggaggcccgttccaagccagctcgccctcctaccacctgtactacggcgcctcggccggctcctaccagttctccatggtgggcggcgagcgctcgccgccgcgcatcctgccgccctgcaccaacgcctccaccggctccgcgctgctcaaccccagcctcccgaaccagagcgacgtggtggaggccgagggcagccacagcaactcccccaccaacatggcgccctccgcgcgcctggaggaggccgtgtggaggccctactgaggcgccaggcctggcccggctgggccacgcgggccgccgccttcgcctccgggcgcgcgggcctcctgttcgcgacaagcccgccgggatcccgggccctgggcccggccaccgtcctggggccgagggcgcccgacggccaggatctcgctgtaggtcaggcccgcgcagcctcctgcgcccagaagcccacgccgccgccgtctgctggcgccccggccctcgcggaggtgtccgaggcgacgcacctcgagggtgtccgccggccccagcacccaggggacgcgctggaaagcaaacaggaagattcccggagggaaactgtgaatgcttctgatttagcaatgctgtgaataaaaagaaagattttatacccttgacttaactttttaaccaagttgtttattccaaagagtgtggaattttggttggggtggggggagaggagggatgcaactcgccctgtttggcatctaattcttatttttaatttttccgcaccttatcaattgcaaaatgcgtatttgcatttgggtggtttttatttttatatacgtttatataaatatatataaattgagcttgcttctttcttgctttgaccatggaaagaaatatgattcccttttctttaagttttatttaacttttcttttggacttttgggtagttgtttttttttgttttgttttgtttttttgagaaacagctacagctttgggtcatttttaactactgtattcccacaaggaatccccagatatttatgtatcttgatgttcagacatttatgtgttgataattttttaattatttaaatgtacttatattaagaaaaatatcaagtactacattttcttttgttcttgatagtagccaaagttaaatgtatcacattgaagaaggctagaaaaaaagaatgagtaatgtgatcgcttggttatccagaagtattgtttacattaaactccctttcatgttaatcaaacaagtgagtagctcacgcagcaacgtttttaataggatttttagacactgagggtcactccaaggatcagaagtatggaattttctgccaggctcaacaagggtctcatatctaacttcctccttaaaacagagaaggtcaatctagttccagagggttgaggcgggtgccaataattacatctttggagaggatttgatttctgcccagggatttgctcaccccaaggtcatctgataatttcacagatgctgtgtaacagaacacagccaaagtaaactgtgtaggggagccacatttacataggaaccaaatcaatgaatttaggggttacgattatagcaatttaagggccaccagaagcaggcctcgaggagtcaatttgcctctgtgtgcctcagtggagacaagtgggaaaacatggtcccacctgtgcgagaccccctgtcctgtgctgctcactcaacaacatctttgtgttgctttcaccaggctgagaccctaccctatggggtatatgggcttttacctgtgcaccagtgtgacaggaaagattcatgtcactactgtccgtggctacaattcaaaggtatccaatgtcgctgtaaattttatggcactatttttattggaggatttggtcagaatgcagttgttgtacaactcataaatactaactgctgattttgacacatgtgtgctccaaatgatctggtggttatttaacgtacctcttaaaattcgttgaaacgatttcaggtcaactctgaagagtatttgaaagcaggacttcagaacagtgtttgatttttattttataaatttaagcattcaaattaggcaaatctttggctgcaggcagcaaaaacagctggacttatttaaaacaacttgtttttgagttttcttatatatatattgattatttgttttacacacatgcagtagcactttggtaagagttaaagagtaaagcagcttatgttgtcaggtcgttcttatctagagaagagctatagcagatctcggacaaactcagaatatattcactttcatttttgacaggattccctccacaactcagtttcatatattattccgtattacatttttgcagctaaattaccataaaatgtcagcaaatgtaaaaatttaatttctgaaaagcaccattagcccatttcccccaaattaaacgtaaatgttttttttcagcacatgttaccatgtctgacctgcaaaaatgctggagaaaaatgaaggaaaaaattatgtttttcagtttaattctgttaactgaagatattccaactcaaaaccagcctcatgctctgattagataatcttttacattgaacctttactctcaaagccatgtgtggagggggcttgtcactattgtaggctcactggattggtcatttagagtttcacagactcttaccagcatatatagtatttaattgtttcaaaaaaaatcaaactgtagttgttttggcgataggtctcacgcaacacatttttgtatgtgtgtgtgtgtgcgtgtgtgtgtgtgtgtgtgaaaaattgcattcattgacttcaggtagattaaggtatctttttattcattgccctcaggaaagttaaggtatcaatgagacccttaagccaatcatgtaataactgcatgtgtctggtccaggagaagtattgaataagccatttctactgcttactcatgtccctatttatgatttcaacatggatacatatttcagttctttctttttctcactatctgaaaatacatttccctccctctcttccccccaatatctccctttttttctctcttcctctatcttccaaaccccactttctccctcctccttttcctgtgttctcttaagcagatagcacatacccccacccagtaccaaatttcagaacacaagaaggtccagttcttcccccttcacataaaggaacatggtttgtcagcctttctcctgtttatgggtttcttccagcagaacagagacattgccaaccatattggatctgcttgctgtccaaaccagcaaacttcctgggcaaatcacaatcagtgagtaaatagacagcctttctgctgccttgggtttctgtgcagataaacagaaatgctctgattagaaaggaaatgaatggttccactcaaatgtcctgcaatttaggattgcagatttctgccttgaaatacctgtttctttgggacattccgtcctgatgatttttatttttgttggtttttatttttggggggaatgacatgtttgggtcttttatacatgaaaatttgtttgacaataatctcacaaaacatattttacatctgaacaaaatgcctttttgtttaccgtagcgtatacatttgttttgggatttttgtgtgtttgttgggaattttgtttttagccaggtcagtattgatgaggctgatcatttggctctttttttccttccagaagagttgcatcaacaaagttaattgtatttatgtatgtaaatagattttaagcttcattataaaatattgttaatgcctataactttttttcaatttttttgtgtgtgtttctaaggactttttcttaggtttgctaaatactgtagggaaaaaatgcttctttctaactttgtttattttagactttaaaatgagctacttcttattcacttttgtaaacagctaatagcatggttccaattttttttaagttcactttttttgttctaggggaaatgaatgtgcaaaaaaagaaaaagaactgttggttatttgtgttattctggatgtataaaaatcaatggaaaaaaataaactttcaaattgaaatgacggtataacacatctactgaaaaagcaacgggaaatgtggtcctatttaagccagcccccacctagggtctatttgtgtggcagttattgggtttggtcacaaaacatcctgaaaattcgtgcgtgggcttctttctccctggtacaaacgtatggaatgcttcttaaaggggaactgtcaagctggtgtcttcagccagatgacatgagagaatatcccagaaccctctctccaaggtgtttctagatagcacaggagagcaggcactgcactgtccacagtccacggtacacagtcgggtgggccgcctcccctctcctgggagcattcgtcgtgcccagcctgagcagggcagctggactgctgctgttcaggagccaccagagccttcctctctttgtaccacagtttcttctgtaaatccagtgttacaatcagtgtgaatggcaaataaacagtttgacaagtacata

SEQ ID NO: 520 - DNA, 484 bp, Homo sapiens
  misc_feature (1)..(484): "n" represents an unknown nucleotide
acttgtcaaactgtttatttgccattcacactgattgtaacactggatttacagaagaaactgtggtacaaagagaggaaggctctggtggctcctgaacagcagcagtccagctgccctgctcaggctgggcacgacgaatgctcccaggagaggggaggcggcccacccgactgtgtaccgtggactgtggacagtgcagtgcctgctctcctgtgctatctagaaacaccttggagagagggttctgggatattctctcatgtcatctggctgaagacaccagcttgacagttccccnttaagaaagcatttccataacgttttgtaccaagggagaaagaagccccacgcaacgaatttttcagggatgtttttgttgacccaaccccaataacttgggccacaccaaaatagacccctaggtgggggggctgggcntaaaatagtnaccacattttnccgttggctttttttcaagtaa

SEQ ID NO: 521 - DNA, 448 bp, Homo sapiens
  misc_feature (1)..(448): "n" represents an unknown nucleotide
gctctgattagaaaggaaatgaatggttccactcaaatgtcctgcaatttaggattgcagatttctgccttgaaatacctgtttctttgggacattccgtcctgatgattttnatttttgttggtttntatttttggggggaatgacatgtttgggtcttttatacatgaaaatttgtttgacaataatctcacaaaacatattttacatctgaacaaaatgcctttttgtttaccgtagcgtatacatttgttttgggatttttgtgtgtttgttgggaattttgtttttagccaggtcagtattgatgaaggcctgatcaattttgggctccttttttttcccttcccagaaagaagttggcatccaaccaaaagttaattgggaatttantgtaatgnaaaantaggantttaaagcntccaattattaaaaaattggtaaatgg

SEQ ID NO: 522 - DNA, 1826 bp, Homo sapiens
gaattccgggccttccctatgttcaccaccaacaatcgagtgaagaggagaccttccccctatgagatggagattactgatggcactgaccctcagggattccctgcacttcctcccaagtcttccttagagtctggagtctgcttcctccctgcaatggagtcatcaagggttttctccgaggtccctacacagtaggctccccttgtctcccgttaacacattctgggcttagacctggagttcccttcctgacatcatggattctaccttgccccctggattccccgagaagggccttggcactgctcctttgaggtccccacaccaaagttgtgcggcgtatcttcaccaacagccgggagcgatggcggcagcagaatgtgaacggggcctttgccgagctccgcaagctgatccccacacatcccccggacaagaagctcagcaagaatgagatcctccgcctggccatgaagtatatcaacttcttggccaagctgctcaatgaccaggaggaggagggcacccagcgggccaagactggcaaggaccctgtggtgggggctggtgggggtggaggtgggggagggggcggcgcgcccccagatgacctcctgcaagacgtgctttcccccaactccagctgcggcagctccctggatggggcagccagcccggacagctacacggaggagcccgcgcccaagcacacggcccgcagcctccatcctgccatgctgcctgccgccgatggagccggccctcggtgatgggtctgggccaccaggatcagccaggagggcgttcttaggctgctgggatggtgggcttcagggcaggtggggtgagaattgggcggctctgaagcaaggcggtggacttgaactttcctggatgtctgaactttgggaagcctttactgaccctggggctggcttttctgtttcctgtaccagtaggagatcagaaaaatggagcaaagtggtaggtactttttgtgaagacggcacggtcttccctcttccctcagtcccaaatccttcccaagtaagaggctggagttgtcactgcttttggcctggagtttgggatccctgtctttcctaagacctggggttgtcagctctcatctgaggcatccagcagtctctgccttgcctttagcccctcccaagctggctggggtggcctgtgtggccacttctgtccatatttataggtacccaatagctgcccatttcgtgagccccatcttcacccaggcctatgttgatccatccagcttgccagatgctgcagagtcacaagcctcgaggtgccttcttcagggcctggttgaagaagatgatcagtggacagtctgctctagatgagctgggccggagggtcaggaaacccagtcgcccttacttcttgccctggggatcaaagttctgctttctccccaatgagacttgccttcctaagcctgtggctgtggagaccatgtctgcagccctgagaaagccctgtcgggctttgtgtgaaggcagagaaagggacaatgatagtagagtgatatggagcaagagatattttgggcatgtgggcttcaactcctcgacatcactgttcatgctggcgagtgaatgccagtgtgctgatgggcgtacgctggtgctgagtagatgcgcagccccatctgtgcattctcctggatgcttagagggatttctttgctgtaagatgtctgtttgctgatggtctggtctatgttccgaattgagcacaaaacctgtcctatgaatgctttgcatttggaaaaaaaaaaaaaaccggaattc

SEQ ID NO: 523 - DNA, 453 bp, Homo sapiens
  misc_feature (1)..(453): "n" represents an unknown nucleotide
ccaaatgcaaagattcataggacaggttttgtgctcaattcggaacatagaccagaccatcagcaaacagacatcttacagcaaagaaatccctctaagcatccaggagaatgcacagatggggctgcgcatctactcagcaccagcgtacgccatcagcacactggcattcactcgccagcatgaacagtgatgtcgaggagttgaagcccacatgcccaaaatatctcttgctccatatcactctactatcattgtccctttctctgccttcacacaaagcccgaaggtttncttcaggggctgcaggacatgggtctccacagccacaggtttagggaagggcaagtctcattggggggaggaaggcaggaacttttgatccccggggggncaggaggtagggggccgattggggttttcctggacccttccgggcccagnttcatntgg

SEQ ID NO: 524 - DNA, 222 bp, Homo sapiens
ccatcttcacccaggcctatgttgatccatccagcttgccagatgctgcagagtcacaagcctcgaggtgccttcttcagggcctggttgaagaagatgatcagtggacagtctgctctagatgagctgggccggaggtcaggaaacccagtcgcccttacttcttgccctgggggatcaaagttctgctttctccccaatgagacttgccttcctaaagcc

SEQ ID NO: 525 - DNA, 1806 bp, Homo sapiens
agcctcgccagagaagacaagggcagaaagcaccatgagtgggggcccaatgggaggaaggcccgggggccgaggagcaccagcggttcagcagaacataccctccaccctcctccaggaccacgagaaccagcgactctttgagatgcttggacgaaaatgcttgacgctggccactgcagttgttcagctgtacctggcgctgccccctggagctgagcactggaccaaggagcattgtggggctgtgtgcttcgtgaaggataacccccagaagtcctacttcatccgcctttacggccttcaggctggtcggctgctctgggaacaggagctgtactcacagcttgtctactccacccccacccccttcttccacaccttcgctggagatgactgccaagcggggctgaactttgcagacgaggacgaggcccaggccttccgggccctcgtgcaggagaagatacaaaaaaggaatcagaggcaaagtggagacagacgccagctacccccaccaccaacaccagccaatgaagagagaagaggagggctcccacccctgcccctgcatccaggtggagaccaaggaggccctccagtgggtccgctctccctggggctggcgacagtggacatccagaaccctgacatcacgagttcacgataccgtgggctcccagcacctggacctagcccagctgataagaaacgctcagggaagaagaagatcagcaaagctgatattggtgcacccagtggattcaagcatgtcagccacgtggggtgggacccccagaatggatttgacgtgaacaacctcgacccagatctgcggagtctgttctccagggcaggaatcagcgaggcccagctcaccgacgccgagacctctaaacttatctacgacttcattgaggaccagggtgggctggaggctgtgcggcaggagatgaggcgccaggagccacttccgccgcccccaccgccatctcgaggagggaaccagctcccccggccccctattgtggggggtaacaagggtcgttctggtccactgccccctgtacctttggggattgccccacccccaccaacaccccggggacccccacccccaggccgagggggccctccaccaccaccccctccagctactggacgttctggaccactgccccctccaccccctggagctggtgggccacccatgccaccaccaccgccaccaccgccaccgccgcccagctccgggaatggaccagcccctcccccactccctcctgctctggtgcctgccgggggcctggcccctggtgggggtcggggagcgcttttggatcaaatccggcagggaattcagctgaacaagacccctggggccccagagagctcagcgctgcagccaccacctcagagctcagagggactggtgggggccctgatgcacgtgatgcagaagagaagcagagccatccactcctccgacgaaggggaggaccaggctggcgatgaagatgaagatgatgaatgggatgactgagtggctgagttacttgctgccctgtgctcctccccgcaggacatggctccccctccacctgctctgtgcccaccctccactctcctcttccagggcccccaaccccccatttcttccccaccaacccctccaatgctgttatccctgcctggtcctcacactcacccaacaatcccaaggccctttttatacaaaaattctcagttctcttcactcaaggatttttaaagaaaaataaaagaattgtctttctgtctctctat

SEQ ID NO: 526 - DNA, 407 bp, Homo sapiens
  misc_feature (1)..(407): "n" represents an unknown nucleotide
atttttctttaaaaatccttgagtgaagagaactgagaatttttgtataaaaagggccttgggattgttgggtgagtgtgaggaccaggcagggataacagcattggaggggttggtggggaagaaatggggggttgggggcctggaagaggagagtggagggtgggcacagagcaggtggagggggagccatntcctgcggggaggagcacagggcagcaagtaactcagccactcagtcatcccattcatcatcttcatcttcatcgccagcctgggtcctccccttcgtcggaggagtggatggctctgcttctctttctgcatcacgtgcatcagggccccttcgtgccnaattttttgggcctcgagggcaaatttccctataagttgagtcctatttaaat

SEQ ID NO: 527 - DNA, 369 bp, Homo sapiens
  misc_feature (1)..(369): "n" represents an unknown nucleotide
ggccctgatgcacgtgatgcagaagagaagcagagccatccactcctccgacgaaggggaggaccaggctggcgatgaagatgaagatgatgaatgggatgactgagtggctgagttacttgctgccctgtgctcctccccgcaggacatggctccccctccacctgctctgtgcccaccctccactctcctcttccaggcccccaaccccccatttcttccccaccaacccctccaatgctgttatccctgcctggtcctcacactnacccaacaatcccaaggccctttttatacaaaaattcttnagttctcttcactcaaggatttttaaagaaaaataaaagaattgtcttttctgttttttna

SEQ ID NO: 528 - DNA, 1745 bp, Homo sapiens
tggaagcagcgtaaaggatggacaggaatgcagaggtaggcaggaggaccagcagtgtgactgctgaaacccaggggagggccccgcggctctgaggttgctcgcgcgcccccgccgatcgccatggatcggatgaagaagatcaaacggcagctgtcaatgacactccgaggtggccgaggcatagacaagaccaatggtgcccctgagcagataggcctggatgagagtggtggtggtggcggcagtgaccctggagaggcccccacacgtgctgctcctggggaacttcgttctgcacggggcccactcagctctgcaccagagattgtgcacgaggacttgaagatggggtctgatggggagagtgaccaggcttcagccacgtcctcggatgaggtgcagtctccagtgagagtgcgtatgcgcaaccatcccccacgcaagatctccactgaggacatcaacaagcgcctatcactaccagctgacatccggctgcctgagggctacctggagaagctgaccctcaatagccccatctttgacaagcccctcagccgccgcctccgtcgtgtcagcctatctgagattggctttgggaaactggagacctacattaagctggacaaactgggcgagggtacctatgccaccgtctacaaaggcaaaagcaagctcacagacaaccttgtggcactcaaggagatcagactggaacatgaagagggggcaccctgcaccgccatccgggaagtgtccctgctcaaggacctcaaacacgccaacatcgttacgctacatgacattatccacacggagaagtccctcacccttgtctttgagtacctggacaaggacctgaagcagtacctggatgactgtgggaacatcatcaacatgcacaacgtgaaactgttcctgttccagctgctccgtggcctggcctactgccaccggcagaaggtgctacaccgagacctcaagccccagaacctgctcatcaacgagaggggagagctcaagctggctgactttggcctggcccgagccaagtcaatcccaacaaagacatactccaatgaggtggtgacactgtggtaccggccccctgacatcctgcttgggtccacggactactccactcagattgacatgtggggtgtgggctgcatcttctatgagatggccacaggccgtcccctctttccgggctccacggtggaggaacagctacacttcatcttccgtatcttaggaaccccaactgaggagacgtggccaggcatcctgtccaacgaggagttcaagacatacaactaccccaagtaccgagccgaggcccttttgagccacgcaccccgacttgatagcgacggggccgacctcctcaccaagctgttgcagtttgagggtcgaaatcggatctccgcagaggatgccatgaaacatccattcttcctcagtctgggggagcggatccacaaacttcctgacactacttccatatttgcactaaaggagattcagctacaaaaggaggccagccttcggtcttcgtcgatgcctgactcaggcaggccagctttccgcgtggtggacaccgagttctaagccacagaccgaggccccagcaggcagcggctggagggatgccacacccctcacagggcagcccccaactacatcttccctgcttactctctgcctacctgcctgagccatgttcacctgcccacttgtcc

SEQ ID NO: 529 - DNA, 498 bp, Homo sapiens
tgaaggagtgatgagagctttgttagcacccagcagacaggccaatgggtgggttgacaggccaatggtggggtgtttgggcaggcagcaggggacaagtgggcaggtgaacatggctcaggcaggtaggcagagagtaagcagggaagatgtagttgggggctgccctgtgaggggtgtggcatccctccagccgctgcctgctggggcctcggtctgtggcttagaactcggtgtccaccacgcggaaagctggcctgcctgtgggggaaagcagagcagatggctgagtcaggcatcgacgaagaccgaaggctggcctccttttgtagctgaatctcctttagtgcaaatatggaagtagtgtcaggaagtttgtggatccgctcccccagactgaggaagaatggatgtttcatggcatcctctgcggagatccgatttctgacctcaaactgcaacagctttgtgaggaggtcggcccgtcgctatcaagtc

SEQ ID NO: 530 - DNA, 443 bp, Homo sapiens
  misc_feature (1)..(443): "n" represents an unknown nucleotide
ttagagtcaagatcttttatttcctgattttaaaaatcgtcaccatcatagacctcctggcttctcttgtatctgtgttctaatggctcccagcagtgccttcacacagcccctttattccccttcttgtgcctgcccatgagcctgagtgtgacagatcaattagctttgtccctccaaactgtgggagcaggactagactcttctggcaggcagagagctcctcctcggccagtgttcgagcctggtccaccactcctcagttcttcttgctcttggcttttgtggccttggaatccagcgttgctctgggcatgagtgaggtgcttcacagcatcaagcacaaggactccaggcagcaccagccacagggnattcatgaagacaaagtaaaaccagaagtagagagggtgggcccagctctccgtgctggnatccgtcgg

SEQ ID NO: 531 - DNA, 444 bp, Homo sapiens
ttttgttttgatagttatgtcttttaatatgtattagaagaatacataattagcacacatcaaacctgtgatttcacagatatcactacttgggatgaaaatgatataggataacaatgttagacctcagatcaacctcaagaaaaatactgagtaaatagtacaggagggcaatttggaagtattattaaaaaccaatatataaatatcctatgactttgcaattccacttctaggaatcaaccctaggtaaactttcatacatatactttcacacaggcatagtgatgctcctgtgtagtattttgtaatagcaaaacctaaaaacagtcttaatgtccatcacaaaagaaatgcgtaagtaaaatgtggtaatcatatgatgacaatctatacagcaattacagaagatggattgagctacattaagtaacatgcacagat

SEQ ID NO: 532 - DNA, 451 bp, Homo sapiens
  misc_feature (1)..(451): "n" represents an unknown nucleotide
aatnattaacaagcaaaggcccagcagaattctgtgcttcttggtgaagaaagagaggagtccttgaatggcgggggagacacaaaagggaccccccaaaatccacatggggtgctgggaaccccaaaatccagtggaaggcacatcaggcacaaattccagagaggttctgagtggaatccctgccacaaatcccagccattggagatggaggagctcccaaaatttagaagtatccccaaagccaagaggaaaccaaatgatgggaggagacagggggctcagtctttgggcgggggtcccccaatttccagaagaactgggaaaaggcacatgggggncccccttcatcttcccggggtgggggaatggggggattcctnagggcagcntcaggggcagagacgaactttgtttgggttggtngggcaaggttccttgggcttnggag

SEQ ID NO: 533 - DNA, 452 bp, Homo sapiens
  misc_feature (1)..(452): "n" represents an unknown nucleotide
agcgggaggagcggcccctcttcccccagatcctggccacaattgagctgctgcaacggtcactccccaagattgagcggagtgcctcggaaccctccttgcaccgcacccaggccgatgagttgcctgcctgcctactcagcgcagccgccttgtgccttaggccccgnccaagccaccagggagccaatctcagccctccacgccaaggagccttgcccaccagccaatcaatgttcgtctctgccctgatgctgcctcaggatcccccattncccaccctgggagatgagggggtccccatgtgcttttccagttcttctgggaattnggggaccccgccaaagattgaggccccctgtgttcctccatcatttngttttcttttgggtttnggggatatttttaaatttggggagtttcttncattttcaatgggtggggattgttgg

SEQ ID NO: 534 - DNA, 487 bp, Homo sapiens
tttccaggaagtcccttccttccctggaaccagcagggcaggcgatgtgggagttattaattctttattaggattcaggtttcaaacaaggtagaaggcagtggcaagaggggttcaggtagggggatgatgagggaacaccagacttggctagttgggccactgccagaagccaaatgggaaccctgggctggaaggggtgtggagaggggtggacaaggggccagcctagaggagcagacggggtcagcggatggtgtatcggacatagggaacctcgacatcctcgccgctctcgtcgttacagcacagctcaagcaccagcgcccgcacgtggcggcccagctttcgcttcgacacacggctcacaatctctgtcatcggctgatccaaccgttccttgagcttggcagctggcatgaagaaggaatagagcatggacacgccctgggacagcatggtgatctctaatttgtgctctgtctta

SEQ ID NO: 535 - DNA, 403 bp, Homo sapiens
  misc_feature (1)..(403): "n" represents an unknown nucleotide
tttttttttaaacaaatgaaagctgccttccctgcagccctcaggtcacctccagggaggcaggagacacgcggtcacactcagctcgggacctcaggctatgcactgctccacggctgtgcggtgcgtgttgagcatgcgcctccagtggttggtctcagaggggcctgaagagtactggccaatgacgatcctcccgatgaagtcattgctgctcttcatgttgtggccgaaaactgtaaacactaggctngcattttccagttcttcttggggaactttgaagctgaaggattcattgtagaaaggatcaattgtggccccttaaggaagggacgtctttcttgggttttcacaagttttgaagtcccatggcaccagctggganttttccacaaagggg

SEQ ID NO: 536 - DNA, 351 bp, Homo sapiens
  misc_feature (1)..(351): "n" represents an unknown nucleotide
taaattggggaatatttcttcatatcatttcacattttgtgcaaaaagcaagacgttgttgagagtttaaggacaccacactgtcaaatttgcattattccatgttgcataaaatgagtctgagagcggtttcatcgtgggtcttaacccccaagggacagagatgccagtccccggggattcctggacagctactgagacctcttcccttcctataggatggccagccggagcagtgacaaggatggtgactctgtccacacggccagcgangtcccgctgaccccacggaccaattccccggatngaagacgctcgtnctcagacacatncaagtctacatacagnctg

SEQ ID NO: 537 - DNA, 515 bp, Homo sapiens
gtttaaatactgcactctattttttaaggactctgtgcatggtatttccggtggcagatgtgtaagattttttatgtaaatcgtgttgttttagcagaggactatcagacctgacagcagctggacatcgaggtcctcactggggtggtgactgccacgctgatgctgagtggaagccaagccccttcagtcagagctgggccgatctcagacccaaatgctaccaccaccaagccctgtgtcgcgacggcagcggctgcagtcaccagaaacaatccttcctgcctcgacacccgtgccagccccagccaccctgacggggggctgtccacggaaatgccacggccaagagcccaggtccttcacgctggcctcttcccctgccggctggggtccccaatgccttcagagttcgttgtgccgagctctggagatctgccggacaggtcctgtcaaagcttcttcacgtgtagccagctcttggtccgcccttcagcgggcttcttctcgcgctg

SEQ ID NO: 538 - DNA, 454 bp, Homo sapiens
ccactaaagcagctgagagcgcagaactgaggacaagagcgtgggcgaggacgtgtgaccgacgcaaacaccctgtgagcgaccaaggactgggtacacgtgaaaacactgaggacctgtcggcagatctccagagctcggcacaacgaactctgaaggcattggggagcccagcccggcaggaagaggccagcgtgaaggacctgggctcttggccgtggcatttccgtggacagcccgccgtcaggtggctggggctggcacgggtgtcgaggcaggaaggattgtttctggtgactgcagccgctgccgtcgcgacacagggcttggtggtggtagcatttgggtctgagatcgggccagctctgactgaaggggcttggcttccactcagcatcagcgtggcagtctacaccccagtgaggacctcgatgtccagctgctgtcaggtctg

SEQ ID NO: 539 - DNA, 985 bp, Homo sapiens
gcggagctgggtgcgagcgccctaccgctttcgctttcccttcgcggtgcccactccactccttgtgcggcgctaggccccccgtcccggtcatggccatgctcagggtccagcccgaggcccaagccaaggtggatgtgtttcgtgaagacctctgtaccaagacagagaacctgctcgggagctatttccccaagaagatttctgagctggatgcatttttaaaggagccagctctcaatgaagccaacttgagcaatctgaaggccccattggacatcccagtgcctgatccagtcaaggagaaagagaaagaggagcggaagaaacagcaggagaaggaagacaaggatgaaaagaagaagggggaggatgaagacaaaggtcctccctgtggcccagtgaactgcaatgaaaagatcgtggtccttctgcagcgcttgaagcctgagatcaaggatgtcattgagcagctcaacctggtcaccacctggttgcagctgcagatacctcggattgaggatggtaacaattttggagtggctgtccaggagaaggtgtttgagctgatgaccagcctccacaccaagctagaaggcttccacactcaaatctctaagtatttctctgagcgtggtgatgcagtgactaaagcagccaagcagccccatgtgggtgattatcggcagctggtgcacgagctggatgaggcagagtaccgggacatccggctgatggtcatggagatccgcaatgcttatgctgtgttatatgacatcatcctgaagaacttcgagaagctcaagaagcccaggggagaaacaaagggaatgatctattgagagccctctctcccattctgtgatgagtacagcagagaccttcctgctttttactggggactccagattttccccaaacttgcttctgttgagatttttccctcaccttgcctctcaggcacaataaatatagttataccact

SEQ ID NO: 540 - DNA, 137 bp, Homo sapiens
  misc_feature (1)..(137): "n" represents an unknown nucleotide
gaggaanggtgagggaaaaatctcaacagaagcaagtttggggaaaatctggagtccccagtaaaaagcaggaaggtctctgctgtactcatcacagaatgggagagagggctctcaatagatcattccctttgttt

SEQ ID NO: 541 - DNA, 397 bp, Homo sapiens
  misc_feature (1)..(397): "n" represents an unknown nucleotide
catgataaagaggttctctggactgctgcacggaagtcccaagaccacttcgttggcagcttctnctggttaaagggggtcaggaggggaccccanaacacactgatcctgggggggaggagaggtctcccacatggcacagatggggccactgaggctcnaagaggaagtgtgtgtcccccaacagcaagtgtggacagcagaaggaagaggcagggccagcatggagaaaccccattcttagtaggacttccaggggccagtgtccccagaaagggaaggggtctatgtcttcaccctnctctttagcgtccacagagaccntgacccccacccccgagcggattgagggtnttttacacagccttcgcatgcaggagttacagggnaacccngc

SEQ ID NO: 542 - DNA, 1751 bp, Homo sapiens
ccagcgttagcccgcggccaggcagccgggaggagcggcgcgcgctcggacctctcccgccctgctcgttcgctctccagcttgggatggccggctacctgcgggtcgtgcgctcgctctgcagagcctcaggctcgcggccggcctgggcgccggcggccctgacagcccccacctcgcaagagcatccgcggcgccactatgccgacaaaaggatcaaggtggcgaagcccgtggtggagatggatggtgatgagatgacccgtattatctggcagttcatcaaggagaagctcatcctgccccacgtggacatccagctaaagtattttgacctcgggctcccaaaccgtgaccagactgatgaccaggtcaccattgactctgcactggccacccagaagtacagtgtggctgtcaagtgtgccaccatcacccctgatgaggcccgtgtggaagagttcaagctgaagaagatgtggaaaagtcccaatggaactatccggaacatcctgggggggactgtcttccgggagcccatcatctgcaaaaacatcccacgcctagtccctggctggaccaagcccatcaccattggcaggcacgcccatggcgaccagtacaaggccacagactttgtggcagaccgggccggcactttcaaaatggtcttcaccccaaaagatggcagtggtgtcaaggagtgggaagtgtacaactttcccgcaggcggcgtgggcatgggcatgtacaacaccgacgagtccatctcaggttttgcgcacagctgcttccagtatgccatccagaagaaatggccgctgtacatgagcaccaagaacaccatactgaaagcctacgatgggcgtttcaaggacatcttccaggagatctttgacaagcactataagaccgacttcgacaagaataagatctggtatgagcaccggctcattgatgacatggtggctcaggtcctcaagtcttcgggtggctttgtgtgggcctgcaagaactatgacggagatgtgcagtcagacatcctggcccagggctttggctcccttggcctgatgacgtccgtcctggtctgccctgatgggaagacgattgaggctgaggccgctcatgggaccgtcacccgccactatcgggagcaccagaagggccggcccaccagcaccaaccccatcgccagcatctttgcctggacacgtggcctggagcaccgggggaagctggatgggaaccaagacctcatcaggtttgcccagatgctggagaaggtgtgcgtggagacggtggagagtggagccatgaccaaggacctggcgggctgcattcacggcctcagcaatgtgaagctgaacgagcacttcctgaacaccatggacttcctcgacaccatcaagagcaacctggacagagccctgggcaggcagtagggggaggcgccacccatggctgcagtggaggggccagggctgagccggcgggtcctcctgagcgcggcagagggtgagcctcacagcccctctctggaggcctttctaggggatgtttttttataagccagatgtttttaaaagcatatgtgtgtttcccctcatggtgacgtgaggcaggagcagtgcgttttacctcagccagtcagtatgttttgcatactgtaatttatattgcccttggaacacatggtgccatatttagctactaaaaagctcttcacaaaaaaaaaaacggattccgcg

SEQ ID NO: 543 - DNA, 352 bp, Homo sapiens
tgtgaagagctttttagtagctaaatatggcaccatgtgttccaagggcaatataaattacagtatgcaaaacatactgactggctgaggtaaaacgcactgctcctgcctcacgtcaccatgagggggaacacacatatgcttttaaaaacatctggcttataaaaaaacatcccctagaaaggcctccagagaggggctgtgaggctcaccctctgccgcgctcaggaggacccgccggctcagccctggcccctccactgcagccatgggtggcgcctccccctactgcctgcccagggctctgtccaggttgctcttgatggtgtcgaggaagtccgtggtgttcagg

SEQ ID NO: 544 - DNA, 444 bp, Homo sapiens
cagggccagcagcatccgcacctttatccgcactgtaggctgggctgggcagagcgcgcctggccccggggacaccactgtatcactataaaacccagaggaaacaaggaacaagtgcaagtccggggagagggaccactgtcacgcagagaggtcactgttatcaaaacgctcctggtcgtacacttcagccaccaccttgcggccagcaaaccagcggccattgagggcctggatggccttatgagtctcagaggctatggaaaactccacaaagatcttgacaatgatttctgcatcctcctcctcgccttgtttctcttggtagatgatgacgcggttcacggccccgaacttgccacactcctctgtcacctccccttccaggtcatcatcgatgtccttggggtcaccatgttgcgcagaaccatcactgtagactcc

SEQ ID NO: 545 - DNA, 366 bp, Homo sapiens
tggtgtcatcaatccaatttattaagtcctcaatgagggggaggaagggccacatctccctctgcaggccctttgaccatcttgatggcttctgctcctccctgtcccctcagctctgccttggtttccccactgacaaaggggatcttctgctgtcctgtgtgccctgaaactaaaacccagggggaggccagaaatcctcagaagttttccagctccctgcaagaatagccaaggacagagaaatcacaggatcaggacgagcagggcaagctggagcagggggtagaacagaccaagtcctttaccgcagaggaagaaaccacactgtggaatggaaataaatagaggggtccagggcagcag

SEQ ID NO: 546 - DNA, 5869 bp, Homo sapiens
ctcgaggatctcggctcactgcaacctccgcctcccaggttcaagctgttcttctgcctcagcctcccgagtagctgggattacaggcgcctgccaccatgccctgctaatttttgtatttttagtagagatggggtttcaccgtgttggccagactggtctcgaactcctgacctcgtgatccacccgcctcagcctcccaaatgctgggattacagatgtgagccaccgcacccggcctggcagaggatactttttaaggtcaaagacagtagcagaggtggagttcctgggaacagggtcatgaggggaagagggggttcggagggagcgagtagccactggctacctctagaaagggaaggctttggtgcaacatcgttcccctgcagttttactcatctttgcttcctgccctttcatcatccaatcgggcaggcaggacagggcctgagggggcagggatccagtgggtgcctctctagactaaccccagctcaggactcccagagccccttccctgaggccctgctgcccccaagcccagattggggatcccaagcagcacgtaggcagagccagtgaggtccccgttagtcccattgaaagctctaaaaccagcgaaccctcagtccagcctcaggtcaggcatccaggacggcctcagccctcatgggtgagccatctctgcggacactgcacagggcctacgatccatcgctgcctcccgaggatgccagccaggcccccgttgagataactgcttccctgctggacaaggctgggaccagccatctcggtgacagttccagaacccctggcctgggctgctgggttcaatggaaaaaggctgtgactagagtcagggggatggtctcagtgacctcaaggataaggccagatccttgcactgtcagtgacccaaagcaacaggtgtccagagcagcagtgtggcgccttcacgcccccacacatcagcccaactcacccaggacagggactgtagcctcagcactcaacccatgtgccctgtgtggggtctcttcccactgcactcacaggagaggaagggtccctcaggggtccactggggtcccctcctgcaaatggggcaaggagaggggcaaggggctgtctcaaggcccctggagcacatgcaggtcctggactggggctcctgggagggccatgattctgggctccatgagttcagagcagacgccttgtttttccttgtccactgtcagccaccccacccttccctgacccttaaaagaaccaggaaacagcacatgatctgttggaaggaggcattcattctttcctttctgtgggtgtggggaggggaccacagggcacataccccaccctgggatccagctgagcaggggggtcagagatgacagctcttccggctcacaggccaccggcccacatacagggcaatcagaagaaagaaacagcacaaggaaggcacagagggagtcgttgtccctgccagaggtgcagcactccgggaatgtccctcactctccccgtccctctgtcttgcccaatcctgaccaggtgcagaaatcttgccaagtgtttccgcaggagttgctggcaattgcctcacattcctggccttggcaaagaatgaatcaacccaccctagatcccataaatagggccacccaggtgagcctctcactcgccacctcctcttccacccctgccaggcccagcagccaccacagcgcctgcttcctcggccctgaaatcatgcccctaggtctcctgtggctgggcctagccctgttgggggctctgcatgcccaggcccaggactccacctcagacctgatcccagccccacctctgagcaaggtccctctgcagcagaacttccaggacaaccaagtaaggggccaagaggggcacctgcaggcagggcctggggaagagtgggagcagaggggaggagaggtgaagagactcaggaagagcgttgggcaggacttaggagtccagggtccaggtttcagctcactctgtgccaccagggtcccctggtggaaaccatgccccttccccccatccccaccccctctcagcctgaacagactcccccaggtccacatcccctctcccataacccccattgtccaaagaaggtgggagcacttttagtccccctgcacagatgaggaaactgaggctcaggaaggcccaccagccacatgcctcctccagtgaggaggtcaccctcctccctgccagactcagaaccgcctcttcccccaggactcccttctggactgatggcctcctgctcctgccccttcaccagtgcaggcccagcctgggccctgctgcccagctagaggggctcatggttccaagctgggcggcccagaggtgccacagggacagagctggaggggtggctcctagggccattcctgggttgtgcctcttatcagtcccttgcagttccaggggaagtggtatgtggtaggcctggcagggaatgcaattctcagagaagacaaagacccgcaaaagatgtatgccaccatctatgagctgaaagaagacaagagctacaatgtcacctccgtcctgtttaggtgagggccgacatctcctgggggtgtgagagtcagactgacgtcacaggcaagggatggccaaagctgagggatcctgtcgttcacctcgctgttctgcccggaattcatctgtgttcatccttcctctgttccttagagcaacgtttatagcacatttccatgcagacacacagacagtggtggggatggacatgcacagtcgttagaaaacaagacggagagaggaggggtgcctgggagcgggaggaggggacactggatccagcctggaaccccacccagtgccttcatggaaggcttccagggaggtggccttaaaagagccaacctgcttcaaaaggaaatgtggggtgttcccggcaggggctggagtcagagagagcccccccttcaggaaggagcaagccatcgcagggtcaccctgagcagagctgctgagcagcctggaggggcaggtggccacgctagcacctagcacggtcctcaggccccgccccagcggatctgctgcggagtggcttagagcagggctcttgggccgcagggtggggagacttggtggggtgcagcctagggggtcgggagaccagcgaaagtgaagcggggccgtcacaggtgtgagagaacaggcgcagggtgaagaggcagggagccagggatcagccgcccccagtgggtttctgactctggcagctgagtggattgggattggggcatttgtggagcaaggagcagaatacagacaggttggggagctcagccctggggtgccaggggatgggaagtgggaggactcaaggatggggtcaggtttgacccgagagctaggggaacggctggcatggagcagactggaagtaccgaggtggatccccgggagagggtataggaagggaagcagcaagctgagtgcaggggagaaatgcagggtttcctgtgtgttgggtggcggcgggggtgaaagccacccagggaggcagccaaaggaaagaaggacatcgggtgctggagggtctgagtggggtccaggggccccaggcaggccaggagggacagcctggtgtcagctcagggagaaggcccaggcccatctcggctgggtggggtagggcccctccaggtagtgggggatgagctgtcacgggttgggccggactgagagcaacagaaccctgctgctgccctggccccaccttgtccagcacaggaggcccaagcctgggttgtctcccctctcacccacccatctctccctcccaaggaaaaagaagtgtgactactggatcaggacttttgttccaggttgccagcccggcgagttcacgctgggcaacattaagagtgagtcttgagtgaggtggggcactgagttggggctccggggagctgggtaggggcacagaccttcctgcccctccacacagatgtgttgtatggggagaagcccacgttgatgggctggggagggaggggacagctccctcctcccatccagggcagggctgacccctcaccgtccacgcctgcaggttaccctggattaacgagttacctcgtccgagtggtgagcaccaactacaaccagcatgctatggtgttcttcaagaaagtttctcaaaacagggagtacttcaagatcaccctctacggtgggtcctctcccatcccctcggggactggctcctgatcacacttagtgggaggggaggccggtcccccatgaggaagggatctgaggcctcatctactcattcaacgatatttatgtggtgtctgccggccactcactggccatcttggtcacagggagaaccaaggagctgacttcggaactaaaggagaacttcatccgcttctccaaatatctgggcctccctgaaaaccacatcgtcttccctgtcccaatcggtaatggccagtctggatgaggggacggggacatggggactgttcaggcaggatgcttccctaccagggatcagggagaggagggactccgtcctcagcttcagtcactggagcagtggatggtccaggagctccttggaagccactctgggcccaggaagactgtgccccaccccagggtctatgggactcccagggacccaggccgcaagtgctctttcctggcagtttagcccgggtctgcccagacaaggatttcaggcccaggcctgagtatccatttctcagtctcactggcctgacacctctggccaccctcccaggcccccttgttctgggccatctcccccgaccctcccaggcctcgtcaccctgggttttgctgtcctggctgtcctctctcccctggggacttgctcaccactgacttgggagctgtccttgactccagggagcctggcttgggcaggaggctccagccaggccattcagagagccactggcctcccccaggctgagagactgcctggactggtaaacaggcaggagacctgggtgcccgaggagcctgggagctgggcctcactcagggcagcccctccccaggcctttctcccacatcccctgccctgccatccacccctctgttgccccatctctgaaaggaacccccatatcttctgcagctgggccaggtggggcaggggctgcccaggggcagtgcagaggacctggcagtcagggatcacacacacacactcatacacgcacacacacacacagctgcctgttctgacggactttctccctaacagaccagtgtatcgacggctgagtgcacagtgagtgtggctgggcggctgcgagggggcttgtgggaggccagggtgcagtgggctgggggtcttgggcctgcctttgctcatccccctgccccccagcactgctgctgtctttattctgctgtccccatctcgggtgcctcccatttccccacccatcaccctcatatccacctctgtccagggtgccgccagctgccgcaccagcccgaacaccattgagggagctgggagaccctccccacagtgccacccatgcagctgctccccaggccaccccgctgatggagccccaccttgtctgctaaataaacatgtgccctcaggcctctgagtctacactgtttgacccctgggccttcgaggaaggggaggggcgggaggctcccactggcatcactctcagggtctgcacccccaggatggagcctagcgaacccagcctgggtgttagggctgcagagtgaagacacaagcccctggtcatcaccagcagctttgtgg

SEQ ID NO: 547 - DNA, 422 bp, Homo sapiens
  misc_feature (1)..(422): "n" represents an unknown nucleotide
tttttttttttctgagggcacatgtttatttagcagacaaggtggggctccatcagcggggtggcctggggagcagctgcatgggtggcactgtggggagggtctcccagctccctcaatggtgttcgggctggtgcggcactgggcggcaccttgtgcactcagccgtcgatacactggtcgattgggacagggaagacgatgtggttttcagggaggcccagagatttggagaagcggatgaagttctccnttagttccgaagtcagctccttggttctcccgtagaagggtgatcntgaagtactcccncgtttttgagaaactttccttgaagaacacccatagcaagctgggttgtaatttggtgctccaccactcnggacganggtaacncgttaaatccagggtaactccttaat

SEQ ID NO: 548 - DNA, 468 bp, Homo sapiens
  misc_feature (1)..(468): "n" represents an unknown nucleotide
cctcttccacccctgccaggcccagcagccaccacagcgcctgcttcctcggccctgaaatcatgcccctaggtctcctgtggctgggcctagccctgtttgggggctctgcatgcccaggcccaggactccacctcagacctgatcccagccccacctctgagcaaggtccctctgcagcagaacttccaggacaaccaattccaggggaagtggtatgtggtaggcctggcagggaatgcaattctcagagaagacaaagacccgcaaaagatgtatgccaccatctatgagctgaaagaagacaagagctacaatgtcacctccgtcctgtttaggaaaaagaagtgtgactactggatcaggacttttgttccaggttgccagccgggagtncacgctgggcaacattaagagttacctggattaacgagttacctcgtccgagtggtgancacaactacaaca

SEQ ID NO: 549 - DNA, 357 bp, Homo sapiens
atggacgtgttcctcatgatccggcgccacaagaccaccatcttcacggacgccaaggagtccagcacggtgttcgaactgaagcgcatcgtcgagggcatcctcaagcggcctcctgacgagcagcggctgtacaaggatgaccaactcttggatgatggcaagacactgggcgagtgtggcttcaccagtcaaacagcacggccacaggccccagccacagtggggctggccttccgggcagatgacacctttgaggccctgtgcatcgagccgttttccagcccgccagagctgcccgatgtgatgaagccccaggactcgggaagcagtgccaatgaacaagccgtgcagtga

SEQ ID NO: 550 - DNA, 472 bp, Homo sapiens
  misc_feature (1)..(472): "n" represents an unknown nucleotide
ttttttttttttttcttttatatatatatacatttatttatatatatagtatcattatccatcatgcagagagtcttcactgccctaaaatcaaagtctgtttatcccattagctgcattataaacctgtgatttttctagtaactagtagatcacacaaacaactccaaaattcgctttatcttcagttctacagtaacagtcaaatcaggcaaggcagccattctcagttagtgggggtgggatcttgaatataggactcaggaaaatctgccagganggccttgtcttctcctgcaggaaaggaatttttaaatttttacggacttggaatgacctcatcatggccacctaaggtctgtttctttcatctggaacagggcattcttaaatcngtcgtggcatttctctaaaaacacggtattctcccaattctccggggtggacttntccaaatggtcccctgggggtt

SEQ ID NO: 551 - DNA, 152 bp, Homo sapiens
  misc_feature (1)..(152): "n" represents an unknown nucleotide
cgccacaagaccaccatcttcacggacgccaaggagtccagcacggtgttcgaactgaagcgcatcgtcgngggcatcctcaagcggcctcctgacgagcagcggctgtacaaggatgaccaactcttggatgatgngcaagacactggggc

SEQ ID NO: 552 - DNA, 732 bp, Homo sapiens
tgctgcgaaccacgtgggtcccgggcgcgtttcgggtgctggcggctgcagccggagttcaaacctaagcagctggaaggaaccatggccaactgtgagcgtaccttcattgcgatcaaaccagatggggtccagcggggtcttgtgggagagattatcaagcgttttgagcagaaaggattccgccttgttggtctgaaattcatgcaagcttccgaagatcttctcaaggaacactacgttgacctgaaggaccgtccattctttgccggcctggtgaaatacatgcactcagggccggtagttgccatggtctgggaggggctgaatgtggtgaagacgggccgagtcatgctcggggagaccaaccctgcagactccaagcctgggaccatccgtggagacttctgcatacaagttggcaggaacattatacatggcagtgattctgtggagagtgcagagaaggagatcggcttgtggtttcaccctgaggaactggtagattacacgagctgtgctcagaactggatctatgaatgacaggagggcagaccacattgcttttcacatccatttcccctccttcccatgggcagaggaccaggctgtaggaaatctagttatttacaggaacttcatcataatttggagggaagctcttggagctgtgagttctccctgtacagtgttaccatccccgaccatctgattaaaatgcttcctcccagc

SEQ ID NO: 553 - DNA, 164 bp, Homo sapiens
  misc_feature (1)..(164): "n" represents an unknown nucleotide
tctgccctcctgtcattcatagatccagttctgagcacagctcgtgtaatctaccagttcctcagggtgaaaccacaagccgatctccttctctgcactttccacagaatcactgccatgtataatgttcctgccaacttgtatgcagaagtntccacggatgg

SEQ ID NO: 554 - DNA, 342 bp, Homo sapiens
  misc_feature (1)..(342): "n" represents an unknown nucleotide
gctggcggctgcagcgaagtttcaaacctaagcagctggaaggagccatggccaactgtgagcgtaccttcattgcgatcaaaccagatggggtccagcggggtcttgtgggagagattatcaagcgttttgagcagaaaggattccgccttgttggtctgaaattcatgcaagcttccgaagatcttctcaaggaacactacgttgacctgaaggaccntccattctttgccngcctgggtgaaatacatgcactcagggccngtagttgccatggtctngggaggggctgaatgtnggtgaagacgggccnagtcatgcttccggggagaccaacccttg

SEQ ID NO: 555 - DNA, 1173 bp, Homo sapiens
cggcacgagcacagtgctccggatcctccaatcttcgctcctccaatctccgctcctccacccagttcaggaacccgcgaccgctcgcagcgctctcttgaccactatgagcctcctgtccagccgcgcggcccgtgtccccggtccttcgagctccttgtgcgcgctgttggtgctgctgctgctgctgacgcagccagggcccatcgccagcgctggtcctgccgctgctgtgttgagagagctgcgttgcgtttgtttacagaccacgcagggagttcatcccaaaatgatcagtaatctgcaagtgttcgccataggcccacagtgctccaaggtggaagtggtagcctccctgaagaacgggaaggaaatttgtcttgatccagaagccccttttctaaagaaagtcatccagaaaattttggacggtggaaacaaggaaaactgattaagagaaatgagcacgcatggaaaagtttcccagtctacagcagagaagttttctggaggtctctgaacccagggaagacaagaaggaaagattttgttgttgtttgtttatttggtttccccagtagttagctttcttccctggattcctcacttttgaagagtgtgaggaaaacctatgtttggcgcttaagctttcagctcagcttaatgaagtgtttagcatagtacctctgctatttgctgttattttatctgctatgctattgaagttttggcaattgactatagtgtgagccaggaatcactggctgttaatcttacaaagtgtcttggaattgtaggtgactattatttttccaagaaatatcccttaagatattaactgagaaggctgggggtttaatgtggaaatgatgtttcaaaaggaatcctgtgatggaaatacaactggtatcttcacttttttaggaattgggaaatattttaatgtttcttggggaatatgttagagaattcccttactcttgattgtgggatactatttaattatttcactttagaaagctgagtgtttcacaccttatctatgtagaatatatttccttattcagaatttctaaaagtttaagttctatgagggctaatatcttatcttcctataattttagacattgctttaactttttagtaaaaaaaaaaaaaaaaaaaaaaaaaaaa

SEQ ID NO: 556 - DNA, 111 bp, Homo sapiens
  misc_feature (1)..(111): "n" represents an unknown nucleotide
atatattaaatttaatatatatctaattactcataacaaaatnntcaaaacctttaaaanatacacaatanncatctaaaaanctcancaatnctaaatatataatatata

SEQ ID NO: 557 - DNA, 477 bp, Homo sapiens
  misc_feature (1)..(477): "n" represents an unknown nucleotide
aatcttcgctcctccaatctccgctcctccacccagttcaggaacccgcgaccgctcgcagcctctcttgaccactatgagcctcctgtccagccgcgcgcccgtgtccccggtccttcgagctccttgtgcgcgctgttggtgctgctgctgctgctgacgtaccagggcccatcgtcagcgctggtcctgccgctgctgtgttgagagagctgcgttgcgtttgtttacagaccacgnagggagttcatcccaaaatgatcagtaatctgcaagtgttcgncatagggccacagttgttncaaggttgaagtggtagccttnctgaagaacgggaaggaaattttgttcttgattncagaagaccnttttttntaaaganagtcattncagaaaatttttgggacggtnggaaacaaggnataattgattaaggagaaatgaggcacgnatgggaaaagttttnccagtttttca

SEQ ID NO: 558 - DNA, 1819 bp, Homo sapiens
tcagccaatcacagtttgaaacctttgccctctgttccagaagagaaaaagcccaggcataaaatcatctccatattctcaggcacagagaaaggaagtaaaaagaaagaaaaggaacggccagaaatttctcctccatctgattttgagcacaccatccatgttggctttgatactgttactggagaattcactggcatgccagaacagtgggctcgattactacagacctccaatatcaccaaactagagcaaaagaagaatcctcaggctgtgctggatgtcctaaagttctacgactccaacacagtgaagcagaaatatctgagctttactcctcctgagaaagatggctttccttctggaacaccagcactgaatgccaagggaacagaagcacccgcagtagtgacagaggaggaggatgatgatgaagagactgctcctcccgttattgccccgcgaccggatcatacaaaatcaatttacacacggtctgtaattgaccctgttcctgcaccagttggtgattcacatgttgatggtgctgccaagtctttagacaaacagaaaaagaagactaagatgacagatgaagagattatggagaaattaagaactatcgtgagcataggtgaccctaagaaaaaatatacaagatatgaaaaaattggacaaggggcttctggtacagttttcactgctactgacgttgcactgggacaggaggttgctatcaaacaaattaatttacagaaacagccaaagaaggaactgatcattaacgagattctggtgatgaaagaattgaaaaatcccaacatcgttaactttttggacagttacctggtaggagatgaattgtttgtggtcatggaataccttgctgggaggtcactcactgatgtggtaacagaaacgtgcatggatgaagcacagattgctgctgtatgcagagagtgtttacaggcattggagtttttacatgctaatcaagtgatccacagagacatcaaaagtgacaatgtacttttgggaatggaaggatctgttaagctcactgactttggtttctgtgcccagatcacccctgagcagagcaaacgcagtaccatggtcggaacgccatactggatggcaccagaggtggttacacggaaagcttatggccctaaagtcgacatatggtctctgggtatcatggctattgagatggtagaaggagagcctccatacctcaatgaaaatccccttagggccttgtacctaatagcaactaatggaaccccagaacttcagaatccagagaaactttccccaatatttcgggatttcttaaatcgatgtttggaaatggatgtggaaaaaaggggttcagccaaagaattattacagcatcctttcctgaaactggccaaaccgttatctagcttgacaccactgatcatggcagctaaagaagcaatgaagagtaaccgttaacatcactgctgtggcctcatactcttttttccattttctacaagaagccttttagtatatgaaaattattactctttttggggtttaaagaaatggtctgcataacctgaatgaaagaagcaaatgactattctctgaagacaaccaagagaaaattgcaaaaagacaagtatgacttttatatgaaccccttctttagggtccagaaggaattgtggactgaatcactagccttaggtctttcagcaaacagcctatcagggccatttatcatgtgtgagatttgcattttactttgctgactttgttgtaatagatcccattcattgtccccttt

SEQ ID NO: 559 - DNA, 362 bp, Homo sapiens
  misc_feature (1)..(362): "n" represents an unknown nucleotide
attcggnacgaggnaaganatnaaatgcataacctgaatgaaagaagcaaatgactattctctgaagacaaccaagagaaaattgcaaaaagacaagtatgacttttatatgaaccccttctttagggtccagaaggaattgtggactgaatcactagccttaggtctttcagcaaacagcctatcagggccatttatcatgtgtgagatttgcattttactttgctgactttgttgtaatagatcccattcattgtcccctttgggtnatttccaatacttgaaatggcagattggagtttttcagagtatgtgtttcatctgctagtctttctctccttcatagcttttcttttcctgga

SEQ ID NO: 560 - DNA, 580 bp, Homo sapiens
  misc_feature (1)..(580): "n" represents an unknown nucleotide
ggcagttgaggcaggagacatcaagagagtatttgtgccctcctcgggttttaccttccagccgagattcttcccctctctacaaccctctctcctcagcgcttcttctttcttggtttgatcctgactgctgtcatggcgtgccctctggagaaggccctggatgtgatggtgtccaccttccacaagtactcgggcaaagagggtgacaagttcaagctcaacaagtcagaactaaaggagctgctgacccgggagctgcccagcttcttggggaaaaggacagatgaagctgctttccagaagctgatgagcaacttggacagcaacagggacaacgaggtggacttccaagagtactgtgtcttcctgtcctgcatcgccatgatgtgtaacgaattctttgaaggcttcccagataagcagcccaggaagaaatgaaaactcctctgatgtggttggggggtctgccagctggggccctccctgtcgccagtgggcacttttttttttccaccctggctccttcagacacgtgcttgatgctgagcaagttcaataaagattcttggaagtttan

SEQ ID NO: 561 - DNA, 398 bp, Homo sapiens
  misc_feature (1)..(398): "n" represents an unknown nucleotide
acttccaagaatctttattgaacttgcncagcatcaagcacgtgtctgaaggagccagggnggaaaaaaaaaagngcccactggcgacagggagggccccagctggcagaccccccaaccacatcagaggagttttcatttcttccngggctgcttatctgggaagccttcaaagaattcgttacacatcatggcgatgcaggacaggaagacacagtactcttggaagtccaccncgttgtccctgntgctntccaagttgctcatcagcttctggaaagcagcttcatctgnnccttttccccaanaagctgggcagctcccgggtnagnagctcctttagttcngacttgttgagccttgaacttgnccctctttgcccgngtanttgnggaagg

SEQ ID NO: 562 - DNA, 465 bp, Homo sapiens
acaaccctctctcctcagcgcttcttctttcttggtttgatcctgactgctgtcatggcgtgccctctggagaaggccctggatgtgatggtgtccaccttccacaagtactcgggcaaagagggacaagttcaagctcaacaagtcagaactaaaggagctgctgacccgggagctgcccagcttcttggggaaaaggacagatgaagctgctttccagaagctgatgagcaacttggacagcaacagggacaacgaggtggacttccaagagtactgtgtcttcctgtcctgcatcgccaatgatgtgtaacgaattctttgaaggcttcccagataagcagcccaggaagaaatgaaaactcctctgatgtggttggggggtctgccagctggggccctccctgtcgccagtgggcacttttttttttccaccctggctccttcagacacgtgcttgatgct

SEQ ID NO: 563 - DNA, 1761 bp, Homo sapiens
gaattccgccatgtcgcgcggcctccagcttctgctcctgagctgcgcctacagcctggctcccgcgacgccggaggtgaaggtggcttgctccgaagatgtggacttgccctgcaccgccccctgggatccgcaggttccctacacggtctcctgggtcaagttattggagggtggtgaagagaggatggagacaccccaggaagaccacctcaggggacagcactatcatcagaaggggcaaaatggttctttcgacgcccccaatgaaaggccctattccctgaagatccgaaacactaccagctgcaactcggggacatacaggtgcactctgcaggacccggatgggcagagaaacctaagtggcaaggtgatcttgagagtgacaggatgccctgcacagcgtaaagaagagacttttaagaaatacagagcggagattgtcctgctgctggctctggttattttctacttaacactcatcattttcacttgtaagtttgcacggctacagagtatcttcccagatttttctaaagctggcatggaacgagcttttctcccagttacctccccaaataagcatttagggctagtgactcctcacaagacagaactggtatgagcaggatttctgcaggttcttcttcctgaagctgaggctcaggggtgtgcctgtctgttacactggaggagagaagaatgagcctacgctgaagatggcatcctgtgaagtccttcacctcactgaaaacatctggaaggggatcccaccccattttctgtgggcaggcctcgaaaaccatcacatgaccacatagcatgaggccactgctgcttctccatggccaccttttcagcgatgtatgcagctatctggtcaacctcctggacattttttcagtcatataaaagctatggtgagatgcagctggaaaagggtcttgggaaatatgaatgcccccagctggcccgtgacagactcctgaggacagctgtcctcttctgcatcttggggacatctctttgaattttctgtgttttgctgtaccagcccagatgttttacgtctgggagaaattgacagatcaagctgtgagacagtgggaaatatttagcaaataatttcctggtgtgaaggtcctgctattactaaggagtaatctgtgtacaaagaaataacaagtcgatgaactattccccagcagggtcttttcatctgggaaagacatccataaagaagcaataaagaagagtgccacatttatttttatatctatatgtacttgtcaaagaaggtttgtgtttttctgcttttgaaatctgtatctgtagtgagatagcattgtgaactgacaggcagcctggacatagagagggagaagaagtcagagagggtgacaagatagagagctatttaatggccggctggaaatgctgggctgacggtgcagtctgggtgctcgtccacttgtcccactatctgggtgcatgatcttgagcaagttccttctggtgtctgctttctccattgtaaaccacaaggctgttgcatgggctaatgaagatcatatacgtgaaaattctttgaaaacatataaagcactatacagattcgaaactccattgagtcattatccttgctatgatgatggtgttttggggatgagagggtgctatccatttctcatgttttccattgtttgaaacaaagaaggttaccaagaagcctttcctgtagccttctgtaggaattcc

SEQ ID NO: 564 - DNA, 463 bp, Homo sapiens
tgtatatgttttttatttttaactttcattttaagttcatgggtataagtgcaggtttgttacataggtaaacttacatcatgggggttcattgtacagattatgtaatcacccaggtattaagcctagtaaccattactcatttttcctatcccaaagtcttatgagttgaatataaaacagaaaaacaccctttcttcacatgcatacgtttaataacatgaaagccaagacagaggtaaaaacactaaatcaacttggtatccgttttactccctaatattagggggacagtgaacatataactcaagcaataaaatgcctttggaaaccaagaagggaagggcccaagtttgataagggaaagccaacaatggctaaaacatccatgcaacacttcgtgaagtcccttctgccagcggtcccgtgtgtccatatcttggagtgtgttaggctactgctt

SEQ ID NO: 565 - DNA, 340 bp, Homo sapiens
  misc_feature (1)..(340): "n" represents an unknown nucleotide
cactccaagatatggacacacgggagccgctgnagaagggacttcacgaagntttgcatggatgttttagccattgttggctttcccttatcaaacttgggcccttcccttcttggtttccaaaggcattcttattgcttgagttatatgttcacttgtccccctaatattagggagtaaaacggataccaagttgatttagtgtttttacctctgtcttggctttcatgttattaaacgtatgcatgtgaagaaagggtgtttttctgttttatattcaactccataagactttgggataggaaaaaatgagtaatggttactaggcttaatacctggg

SEQ ID NO: 566 - DNA, 4660 bp, Homo sapiens
ggggcttagaaattaacaggttgtttatataattggccttaaatgaggtgagagtgaagagactagagccatctctggaaaacatcattatcccattccccgggaagctaccctctggaactcaagatttgaccatatctgttttgaggattcattatgaacaaagaagtctcccaggtgtgaagtttttcaacatgagtggcctcggggacagttcatccgaccctgctaacccagactcacataagaggaaaggatcgccatgtgacacactggcatcaagcacggaaaagaggcgcagggagcaagaaaataaatatttagaagaactagctgagttactgtctgccaacattagtgacattgacagcttgagtgtaaaaccagacaaatgcaagattttgaagaaaacagtcgatcagatacagctaatgaagagaatggaacaagagaaatcaacaactgatgacgatgtacagaaatcagacatctcatcaagtagtcaaggagtgatagaaaaggaatccttgggaccccttcttttggaggctttggatggatttttctttgttgtgaactgtgaagggagaattgtatttgtgtcagagaatgtaaccagctacttaggttacaatcaggaggaattaatgaataccagcgtctacagcatactgcacgtgggggatcatgcagaatttgtgaagaatctgctaccaaaatcactagtaaatggagttccttggcctcaagaggcaacacgacgaaatagccatacctttaactgcaggatgctaattcaccctccagatgagccagggaccgagaaccaagaagcttgccagcgttatgaagtaatgcagtgtttcactgtgtcacagccaaaatcaattcaagaggatggagaagatttccagtcatgtctgatttgtattgcacggcgattacctcggcctccagctattacgggtgtagaatcctttatgaccaagcaagatactacaggtaaaatcatctctattgatactagttccctgagagctgctggcagaactggttgggaagatttagtgaggaagtgcatttatgcttttttccaacctcagggcagagaaccatcttatgccagacagctgttccaagaagtgatgactcgtggcactgcctccagcccctcctatagattcatattgaatgatgggacaatgcttagcgcccacaccaagtgtaaactttgctaccctcaaagtccagacatgcaacctttcatcatgggaattcatatcatcgacagggagcacagtgggctttctcctcaagatgacactaattctggaatgtcaattccccgagtaaatccctcggtcaatcctagtatctctccagctcatggtgtggctcgttcatccacattgccaccatccaacagcaacatggtatccaccagaataaaccgccagcagagctcagaccttcatagcagcagtcatagtaattctagcaacagccaaggaagtttcggatgctcacccggaagtcagattgtagccaatgttgccttaaaccaaggacaggccagttcacagagcagtaatccctctttaaacctcaataattctcctatggaaggtacaggaatatccctagcacagttcatgtctccaaggagacaggttacttctggattggcaacaaggcccaggatgccaaacaattcctttcctcctaatatttcgacattaagctctcccgttggcatgacaagtagtgcctgtaataataataaccgatcttattcaaacatcccagtaacatctttacagggtatgaatgaaggacccaataactccgttggcttctctgccagttctccagtcctcaggcagatgagctcacagaattcacctagcagattaaatatacaaccagcaaaagctgagtccaaagataacaaagagattgcctcaattttaaatgaaatgattcaatctgacaacagctctagtgatggcaaacctctggattcagggcttctgcataacaatgacagactttcagatggagacagtaaatactctcaaaccagtcacaaactagtgcagcttttgacaacaactgccgaacagcagttacggcatgctgatatagacacaagctgcaaagatgtcctgtcttgcacaggcacttccaactctgcctctgctaactcttcaggaggttcttgtccctcttctcatagctcattgacagaacggcataaaattctacaccggctcttacaggagggtagcccctcagatatcaccactttgtctgtcgagcctgataaaaaggacagtgcatctacttctgtgtcagtgactggacaggtacaaggaaactccagtataaaactagaactggatgcttcaaagaaaaaagaatcaaaagaccatcagctcctacgctatcttttagataaagatgagaaagatttaagatcaactccaaacctgagcctggatgatgtaaaggtgaaagtggaaaagaaagaacagatggatccatgtaatacaaacccaaccccaatgaccaaacccactcctgaggaaataaaactggaggcccagagccagtttacagctgaccttgaccagtttgatcagttactgcccacgctggagaaggcagcacagttgccaggcttatgtgagacagacaggatggatggtgcggtcaccagtgtaaccatcaaatcggagatcctgccagcttcacttcagtccgccactgccagacccacttccaggctaaatagattacctgagctggaattggaagcaattgataaccaatttggacaaccaggaacaggcgatcagattccatggacaaataatacagtgacagctataaatcagagtaaatcagaagaccagtgtattagctcacaattagatgagcttctctgtccacccacaacagtagaagggagaaatgatgagaaggctcttcttgaacagctggtatccttccttagtggcaaagatgaaactgagctagctgaactagacagagctctgggaattgacaaacttgttcaggggggtggattagatgtattatcagagagatttccaccacaacaagcaacgccacctttgatcatggaagaaagacccaacctttattcccagccttactcttctccttctcctactgccaatctccctagccctttccaaggcatggtcaggcaaaaaccttcactggggacgatgcctgttcaagtaacacctccccgaggtgctttttcacctggcatgggcatgcagcccaggcaaactctaaacagacctccggctgcacctaaccagcttcgacttcaactacagcagcgattacagggacaacagcagttgatacaccaaaatcggcaagctatcttaaaccagtttgcagcaactgctcctgttggcatcaatatgagatcaggcatgcaacagcaaattacacctcagccacccctgaatgctcaaatgttggcacaacgtcagcgggaactgtacagtcaacagcaccgacagaggcagctaatacagcagcaaagagccatgcttatgaggcagcaaagctttgggaacaacctccctccctcatctggactaccagttcaaatggggaacccccgtcttcctcagggtgctccacagcaattcccctatccaccaaactatggtacaaatccaggaaccccacctgcttctaccagcccgttttcacaactagcagcaaatcctgaagcatccttggccaaccgcaacagcatggtgagcagaggcatgacaggaaacataggaggacagtttggcactggaatcaatcctcagatgcagcagaatgtcttccagtatccaggagcaggaatggttccccaaggtgaggccaactttgctccatctctaagccctgggagctccatggtgccgatgccaatccctcctcctcagagttctctgctccagcaaactccacctgcctccgggtatcagtcaccagacatgaaggcctggcagcaaggagcgataggaaacaacaatgtgttcagtcaagctgtccagaaccagcccacgcctgcacagccaggagtatacaacaacatgagcatcaccgtttccatggcaggtggaaatacgaatgttcagaacatgaacccaatgatggcccagatgcagatgagctctttgcagatgccaggaatgaacactgtgtgccctgagcagataaatgatcccgcactgagacacacaggcctctactgcaaccagctctcatccactgaccttctcaaaacagaagcagatggaacccaggtgcaacaggttcaggtgtttgctgacgtccagtgtacagtgaatctggtaggcggggacccttacctgaaccagcctggtccactgggaactcaaaagcccacgtcaggaccacagaccccccaggcccagcagaagagcctccttcagcagctactgactgaataaccacttttaaaggaatgtgaaatttaaataatagacatacagagatatacaaatatattatatatttttctgagatttttgatatctcaatctgcagccattcttcaggtcgtagcatttggagcaaaaaaaaaaaaaaaaaa

SEQ ID NO: 567 - DNA, 494 bp, Homo sapiens
tttttttgctccaaatgctacgacctgaagaatggctgcagattgagatatcaaaaatctcagaaaaatatataatatatttgtatatctctgtatgtctattatttaaatttcacattcctttaaaagtggttattcagtcagtagctgctgaaggaggctcttctgctgggcctggggggtctgtggtcctgacgtgggcttttgagttcccagtggaccaggctggttcaggtaagggtccccgcctaccagattcactgtacactggacgtcagcaaacacctgaacctgttgcacctgtagagcattcctctagtctgtaagtcaccacagagaagaactcttctgtcttcttgtcctgggttccatctgcttctggtttgagaaaggtcagtggaatgaagagctgggttgcagtagaagggcctgtgtgtccccagtgcgggatcatttaatctgctcaagggcacacaagtgttcattcctggcat

SEQ ID NO: 568 - DNA, 472 bp, Homo sapiens
  misc_feature (1)..(472): "n" represents an unknown nucleotide
gcatggtcaggcaaaaaccttcactggggacgatgcctgttcaagtaacacctccccgaggtgcntttttcacctggcatgggcatgcagccaggcaaactctaaacagacctccggctgcacctaaccagcttcgacttcaactacagcagcgattacagggacaacagcagttgatacaccaaaatcggcaagctatcttaaaccagtttgcagcaactgctcctgttggcatcaatatgagatcaggcatgcaacagaaattacacctcagccacccctgaatgctcaaatgttggcacaacgtcagcgggaactgtacagtcaacagcaccgacagaggcagctaatacagcagcaaagagccatgcttatgaggcagcaaagttttgggaacaancttcctccctcatctggactaccagttcaaatggggaaccccgtcttcctcagggtgctccacagcaattcc

SEQ ID NO: 569 - DNA, 1036 bp, Homo sapiens
cccggacggcgtttctcctccgagcggcgccggtttcggcttggggggggcggggtacagcccatccatgaccatgggcgacaagaagagcccgaccaggccaaaaagacaagcgaaacctgccgcagacgaagggttttgggattgtagcgtctgcaccttcagaaacagtgctgaagcctttaaatgcagcatctgcgatgtgaggaaaggcacctccaccagaaaacctcggatcaattctcagctggtggcacaacaagtggcacaacagtatgccaccccaccaccccctaaaaaggagaagaaggagaaagttgaaaagcaggacaaagagaaacctgagaaagacaaggaaattagtcctagtgttaccaagaaaaataccaacaagaaaaccaaaccaaagtctgacattctgaaagatcctcctagtgaagcaaacagcatacagtctgcaaatgctacaacaaagaccagcgaaacaaatcacacctcaaggccccggctgaaaaacgtggacaggagcactgcacagcagttggcagtaactgtgggcaacgtcaccgtcattatcacagactttaaggaaaagactcgctcctcatcgacatcctcatccacagtgacctccagtgcagggtcagaacagcagaaccagagcagctcggggtcagagagcacagacaagggctcctcccgttcctccacgccaaagggcgacatgtcagcagtcaatgatgaatctttctgaaattgcacatggaattgtgaaaactatgaatcagggtatgaaattcaaaacctccacctgcccatgctgcttgcatccctggagaatcttctgtggacatcgacctcttagtgatgctgccaggataatttctgcttgccatgggcatctggccaccaaggaatttcgcaccctgacgattactcttgacacttttatgtattccattgttttatatgattttcctaacaatcatttataattggatgtgctcctgaatctacttttaataaaaaaaaaaaa

SEQ ID NO: 570 - DNA, 400 bp, Homo sapiens
  misc_feature (1)..(400): "n" represents an unknown nucleotide
ataaaaagtagattcaggagcacatccaattataaatgattgttaggaaaatcatataaaacaatggaatacataaaagtgtcaagagtaatcgtcagggtgcgaaattccttggtggccagatgcccatgnaagcagaaattatcctggcagcatcactaagaggtcgatgtccacagaagattctccagggatgcaagcagcatgggcaggtggaggttttgaatttcataccctgattcatagttttcacaattccatgtgcaatttcagaaagattcatcattgactgctgacatgtcgccctttggggttgngaaggaacgggaggaagccctttgtccggtgctctctggacccccgagctgctcnggttctgctgttcttgaccctgcactgg

SEQ ID NO: 571 - DNA, 467 bp, Homo sapiens
  misc_feature (1)..(467): "n" represents an unknown nucleotide
actccccggacggcgtttctcctccgagcggcgccggtttcgngttggggggggcggggtacagccatccatgaccatgggcgacaagaagagcccgaccaggccaaaaagacaagcgaaacctgccgcagacgaagggttttgggattgtagcgtctgcaccttcagaaacagtgctgaagcctttaaatgcagcatctgcgactgtgaggaaaggcacctccaccagaaaacctcggatcaattctcagctggtggcacaacaagtggcacaacagtatgccaccccaccaccccctaaaaaggagaagaaggagaaagttgaaaaagcaggacaaaagaggaaanctgagaaaagaccaaggaaatttagtccttagttgttaccaagaaaaataccaaccagaaaancaaaccaaagtctgacatttctgaagatcctcctagttgaagcaaacagcatacag

SEQ ID NO: 572 - DNA, 3927 bp, Homo sapiens
gaattccggcccccgtgtctgggcgtccgcctcctggcctcctggctgaggggaagctgagtgggccacggcccatgtgtcgcactcgcctcggctcccacacagccgcctctgctccagcaaggatgtggctcttccacactctgctctgcatagccagcctggccctgctggccgctttcaatgtggatgtggcccggccctggctcacgcccaagggaggtgcccctttcgtgctcagctcccttctgcaccaagaccccagcaccaaccagacctggctcctggtcaccagccccagaaccaagaggacaccagggcccctccatcgatgttcccttgtccaggatgaaatcctttgccatcctgtagagcatgtccccatccccaaggggaggcaccggggagtgaccgttgtccggagccaccacggtgttttgatatgcattcaagtgctggtccggcggcctcacagcctcagctcagaactcacaggcacctgtagcctcctgggccctgacctccgtccccaggctcaggccaacttcttcgaccttgaaaatctcctggatccagatgcacgtgtggacactggagactgctacagcaacaaagaaggcggtggagaagacgatgtgaacacagccaggcagcgccgggctctggagaaggaggaggaggaagacaaggaggaggaggaagacgaggaggaggaggaagctggcaccgagattgccatcatcctggatggctcaggaagcattgatcccccagactttcagagagccaaagacttcatctccaacatgatgaggaacttctatgaaaagtgttttgagtgcaactttgccttggtgcagtatggaggagtgatccagactgagtttgaccttcgggacagccaggatgtgatggcctccctcgccagagtccagaacatcactcaagtggggagtgtcaccaagactgcctcagccatgcaacacgtcttagacagcatcttcacctcaagccacggctccaggagaaaggcatccaaggtcatggtggtgctcaccgatggtggcatattcgaggaccccctcaaccttacgacagtcatcaactcccccaaaatgcagggtgttgagcgctttgccattggggtgggagaagaatttaagagtgctaggactgcgagggaactgaacctgatcgcctcagacccggatgagacccatgctttcaaggtgaccaactacatggcgctggatgggctgctgagcaaactgcggtacaacatcatcagcatggaaggcacggttggagacgcccttcactaccagctggcacagattggcttcagtgctcagatcctggatgagcggcaggtgctgctcggcgccgtcggggcctttgactggtccggaggggcgttgctctacgacacacgcagccgccggggccgcttcctgaaccagacagcggcggcggcggcagacgcggaggctgcgcagtacagctacctgggttacgctgtggccgtgctgcacaagacctgcagcctctcctacgtcgcgggggctccacagtacaaacatcatggggccgtgtttgagctccagaaggagggcagagaggccagcttcctgccagtgctggagggagagcagatggggtcctattttggctctgagctgtgccctgtggacattgacatggatggaagcacggacttcttgctggtggctgctccattttaccacgttcatggagaagaaggcagagtctacgtgtaccgtctcagcgagcaggatggttctttctccttggcacgcatactgagtgggcaccccgggttcaccaatgcccgctttggctttgccatggcggctatgggggatctcagtcaggataagctcacagatgtggccatcggggcccccctggaaggttttggggcagatgatggtgccagcttcggcagtgtgtatatctacaatggacactgggacggcctctccgccagcccctcgcagcggatcagagcctccacggtggccccaggactccagtacttcggcatgtccatggctggtggctttgatattagtggcgacggccttgccgacatcaccgtgggcactctgggccaggcggttgtgttccgctcccggcctgtggttcgcctgaaggtctccatggccttcacccccagcgcactgcccatcggcttcaacggcgtcgtgaatgtccgtttatgttttgaaatcagctctgtaaccacagcctctgagtcaggcctccgtgaggcacttctcaacttcacgctggatgtggatgtggggaagcagaggagacggctgcagtgttcagacgtaagaagctgtctgggctgcctgagggagtggagcagcggatcccagctttgtgaggacctcctgctcatgcccacagagggagagctctgtgaggaggactgcttctccaatgccagtgtcaaagtcagctaccagctccagacccctgagggacagacggaccatccccagcccatcctggaccgctacactgagccctttgccatcttccagctgccctatgagaaggcctgcaagaataagctgttttgtgtcgcagaattacagttggccaccaccgtctctcagcaggagttggtggtgggtctcacaaaggagctgaccctgaacattaacctaactaactccggggaagattcctacatgacaagcatggccttgaattaccccagaaacctgcagttgaagaggatgcaaaagcctccctctccaaacattcagtgtgatgaccctcagccggttgcttctgtcctgatcatgaactgcaggattggtcaccccgtcctcaagaggtcatctgctcatgtttcagtcgtttggcagctagaggagaatgcctttccaaacaggacagcagacatcactgtgactgtcaccaattccaatgaaagacggtctttggccaacgagacccacacccttcaattcaggcatggcttcgttgcagttctgtccaaaccatccataatgtacgtgaacacaggccaggggctttctcaccacaaagaattcctcttccatgtacatggggagaacctctttggagcagaataccagttgcaaatttgcgtcccaaccaaattacgaggtctccaggttgcagcagtgaagaagctgacgaggactcaggcctccacggtgtgcacctggagtcaggagcgcgcttgtgcgtacagttcggttcagcatgtggaagaatggcattcagtgagctgtgtcatcgcttcagataaagaaaatgtcaccgtggctgcagagatctcctgggatcactctgaggagttactaaaagatgtaactgaactgcagatccttggtgaaatatctttcaacaaatctctatatgagggactgaatgcagagaaccacagaactaagatcactgtcgtcttcctgaaagatgagaagtaccattctttgcctatcatcattaaaggcagcgttggtggacttctggtgttgatcgtgattctggtcatcctgttcaagtgtggcttttttaaaagaaaatatcaacaactgaacttggagagcatcaggaaggcccagctgaaatcagagaatctgctcgaagaagagaattaggacctgctatccactgggagaggctatcagccagtcctgggacttggagacccagcatcctttgcattactttttccttcaggatgatctagagcagcatggagctgttggtagaatattagtttttaaccatacattgtcccaaaagtgtctgtgcattgtgcaaaaagtaaacttaggaaacatttggtattaaataaatttacacttttctttgcaaaaaaaaaaaaaaaaaaaaaaaaaaaaaaaaaaaaaaaaaaaa

SEQ ID NO: 573 - DNA, 442 bp, Homo sapiens
  misc_feature (1)..(442): "n" represents an unknown nucleotide
gcaaagaaaagtgtaaatttatttaataccaaatgtttcctaagtttactttttgcacaatgcacagacacttttgggacaatgtatggttaaaaactaatattctaccaacagctccatgctgctctagatcatcctgaaggaaaaagtaatgcaaaggatgctgggtctccaagtcccaggactggctgatagcctctcccagtggatagcaggtcctaattctcttcttcgagcagattctctgatttcagctgggccttcctgatgctctccaagttcagttgttgatattttcttttaaaaaagccacacttgaacaggatgaccagaatcacgatcaacaccagaagtccaccaacgctgcctttaatgatgataggcaaagaatggtacttctcatctttcaggaagacgacagtgatcttagttctgtggttcn

SEQ ID NO: 574 - DNA, 596 bp, Homo sapiens
  misc_feature (1)..(596): "n" represents an unknown nucleotide
gcgcgtcgggntcatggctctcgtttcaggcctccacggtgtgcacctggagtcaggagcgcgcttgtgcgtacagttcggttcagttactaaaagatgtaactgaactgcagatccttggtgaaatatctttcaacaaatctctatatgagggactgaatgcagagaaccacagaactaagatcactgtcgtcttcctgaaagatgagaagtaccattctttgcctatcatcattaaaggcagcgttggtggacttctggtgttgatcgtgattctggtcatcctgttcaagtgtggcttttttaaaagaaaatatcaacaactgaacttggagagcatcaggaaggcccagctgaaatcagagaatctgctcgaagaagagaattaggacctgctatccactgggagaggctatcagcagtcctgggacttggagacccagcatcctttgcattactttttccttcaggatgatctagagcagcatggagctgttggtagaatattagtttttnancanangntgnncccaaantgtctgtgcantgtgcaaaagtaaacttaggnaacattggnaattaattaaattcacttt

SEQ ID NO: 575 - DNA, 1589 bp, Homo sapiens
gaattcctctggtcctcatccaggtgcgcgggaagcaggtgcccaggagagaggggataatgaagattccatgctgatgatcccaaagattgaacctgcagaccaagcgcaaagtagaaactgaaagtacactgctggcggatcctacggaagttatggaaaaggcaaagcgcagagccacgccgtagtgtgtgccgccccccttgggatggatgaaactgcagtcgcggcgtgggtaagaggaaccagctgcagagatcaccctgcccaacacagactcggcaactccgcggaagaccagggtcctgggagtgactatgggcggtgagagcttgctcctgctccagttgcggtcatcatgactacgcccgcctcccgcagaccatgttccatgtttcttttaggtatatctttggacttcctcccctgatccttgttctgttgccagtagcatcatctgattgtgatattgaaggtaaagatggcaaacaatatgagagtgttctaatggtcagcatcgatcaattattggacagcatgaaagaaattggtagcaattgcctgaataatgaatttaacttttttaaaagacatatctgtgatgctaataaggaaggtatgtttttattccgtgctgctcgcaagttgaggcaatttcttaaaatgaatagcactggtgattttgatctccacttattaaaagtttcagaaggcacaacaatactgttgaactgcactggccaggttaaaggaagaaaaccagctgccctgggtgaagcccaaccaacaaagagtttggaagaaaataaatctttaaaggaacagaaaaaactgaatgacttgtgtttcctaaagagactattacaagagataaaaacttgttggaataaaattttgatgggcactaaagaacactgaaaaatatggagtggcaatatagaaacacgaactttagctgcatcctccaagaatctatctgcttatgcagtttttcagagtggaatgcttcctagaagttactgaatgcaccatggtcaaaacggattagggcatttgagaaatgcatattgtattactagaagatgaatacaaacaatggaaactgaatgctccagtcaacaaactatttcttatatatgtgaacatttatcaatcagtataattctgtactgatttttgtaagacaatccatgtaaggtatcagttgcaataatacttctcaaacctgtttaaatatttcaagacattaaatctatgaagtatataatggtttcaaagattcaaaattgacattgctttactgtcaaaataattttatggctcactatgaatctattatactgtattaagagtgaaaattgtcttcttctgtgctggagatgttttagagttaacaatgatatatggataatgccggtgagaataagagagtcataaaccttaagtaagcaacagcataacaaggtccaagatacctaaaagagatttcaagagatttaattaatcatgaatgtgtaacacagtgccttcaataaatggtatagcaaatgttttgacatgaaaaaaggacaatttcaaaaaaataaaat

SEQ ID NO: 576 - DNA, 520 bp, Homo sapiens
gaaattgtccttttttcatgtcaaaacatttgctataccatttattgaaggcactgtgttacacattcatgattaattaaatctcttgaaatctcttttaggtatcttggaccttgttatgctgttgcttacttaaggtttatgactctcttattctcaccggcattatccatatatcattgttaactctaaaacatctccagcacagaagaagacaattttcactcttaatacagtataatagattcatagtgagccataaaattattttgacagtaaagcaatgtcaattttgaatctttgaaaccattatatacttcatagatttaatgtcttgaaatatttaaacaggtttgagaagtattattgcaactgataccttacatggattgtcttacaaaaatcagtacagaattatactgattgataaatgttccatatatagaaatagtttgttgactggagcattcagtttcattgtttgtatcatcttctagtatacatatgcattctcaatgcc

SEQ ID NO: 577 - DNA, 533 bp, Homo sapiens
  misc_feature (1)..(533): "n" represents an unknown nucleotide
aaatctttaaaggaacagaaaaaactgaatgacttgtgtttcctaaagagactattacaagagataaaaacttgttggaataaaattttgatgggcactaaagaacactgaaaaatatggagtggcaatatagaaacacgaactttagctgcatcctccaagaatctatctgcttatgcagtttttcagagtggaatgcttcctagaagttactgaatgcaccatggtcaaaacggattagggcatttgagaaatgcatattgtattactagaagatgaatacaaacaatggaaactgaatgctccagtcaacaaactatttcttatatatgtgaacatttatcaatcagtataattctgtactgatttttgtaagacaatccatgtaaggtatcagttgcaataatacttctcaaacctgtttaaatatttcaagacattaaatctatgaagtatatatgggttcaaagattccaaatgacattgctttactgtcaaataatntatggccactatgatctatatatgtatta

SEQ ID NO: 578 - DNA, 2216 bp, Homo sapiens
atttgatcctattaagaattgtccaaatgttggagcatttgattgaaaaatccttcttagccattttaaagatagctttccaatgattagacgaattgattctttctgtgactcatcagttcctttcctgtaaaattcatgtcttgctgttgatttgtgaataagaaccagagcttgtagaaaccactttaatcatatccaggagtttgcaagaaacaggtgcttaacactaattcacctcctgaacaagaaaaatgggctgtgaccggaactgtgggctcatcgctggggctgtcattggtgctgtcctggctgtgtttggaggtattctaatgccagttggagacctgcttatccagaagacaattaaaaagcaagttgtcctcgaagaaggtacaattgcttttaaaaattgggttaaaacaggcacagaagtttacagacagttttggatctttgatgtgcaaaatccacaggaagtgatgatgaacagcagcaacattcaagttaagcaaagaggtccttatacgtacagagttcgttttctagccaaggaaaatgtaacccaggacgctgaggacaacacagtctctttcctgcagcccaatggtgccatcttcgaaccttcactatcagttggaacagaggctgacaacttcacagttctcaatctggctgtggcagctgcatcccatatctatcaaaatcaatttgttcaaatgatcctcaattcacttattaacaagtcaaaatcttctatgttccaagtcagaactttgagagaactgttatggggctatagggatccatttttgagtttggttccgtaccctgttactaccacagttggtctgttttatccttacaacaatactgcagatggagtttataaagttttcaatggaaaagataacataagtaaagttgccataatcgacacatataaaggtaaaaggaatctgtcctattgggaaagtcactgcgacatgattaatggtacagatgcagcctcatttccaccttttgttgagaaaagccaggtattgcagttcttttcttctgatatttgcaggtcaatctatgctgtatttgaatccgacgttaatctgaaaggaatccctgtgtatagatttgttcttccatccaaggcctttgcctctccagttgaaaacccagacaactattgtttctgcacagaaaaaattatctcaaaaaattgtacatcatatggtgtgctagacatcagcaaatgcaaagaagggagacctgtgtacatttcacttcctcattttctgtatgcaagtcctgatgtttcagaacctattgatggattaaacccaaatgaagaagaacataggacatacttggatattgaacctataactggattcactttacaatttgcaaaacggctgcaggtcaacctattggtcaagccatcagaaaaaattcaagtattaaagaatctgaagaggaactatattgtgcctattctttggcttaatgagactgggaccattggtgatgagaaggcaaacatgttcagaagtcaagtaactggaaaaataaacctccttggcctgatagaaatgatcttactcagtgttggtgtggtgatgtttgttgcttttatgatttcatattgtgcatgcagatcgaaaacaataaaataaacctggctcaagcacaaaccaatttgtgttgttctgattcaataattggtttctgggtggccaattcagaagaagagtgtacatgctcaacagtctccaggaccatcagtatactgcatttcatgtgcaccaaatattttgaaagacatttataaataattggcttatgactcatatttctctatgaataccttcatacagcaggtataactcttttctttatgggcttaaatattttgtcactgatcctgcaaatggacatcattttagcacactagcggtttatattttaaggaccttcattctctgttctgcacctcttctggaaattgagtaaattttgctttttttttttactcagttgcaacttacgcttggcatcttcagaatgcttttctagcattaagagatgtaaatgataaaggaattattgtatgaaatattacaaagcgtagactatgcattgttattcattataatattttttgctgtcataatcgcctcataaagacaggtttcaaccattaaaatatgttcttcctt

SEQ ID NO: 579 - DNA, 420 bp, Homo sapiens
ttaaggaagaacatattttaatggttgaaacctgtctttatgaggcgattatgacagcaaaaaatattataatgaataacaatgcatagtctacgctttgtaatatttcatacaataattcctttatcatttacatctcttaatgctagaaaagcattctgaagatgccaagcgtaagttgcaactgagtaaaaaaaaaaaagcaaaatttactcaatttccagaagaggtgcagaacagagaatgaaggtccttaaaatataaaccgctagtgtgctaaaatgatgtccatttgcaggatcagtggacaaaatatttaagcccataaagaaaagagttatacctgctgtatgaaggtattccatagagaaatatgagtcataagccaattatttataaatggccttccaaatatttggt

SEQ ID NO: 580 - DNA, 135 bp, Homo sapiens
  misc_feature (1)..(135): "n" represents an unknown nucleotide
taactggattcactttataatttgcaaaacggctgcaggtcaacctattggtcaagccatcagaaaaaattcaagtattaaagaatctgaagaggaactatatngtgcctattctttggcttaatgagactggga

SEQ ID NO: 581 - DNA, 5570 bp, Homo sapiens
ggcccctcagccctgctgcccagcacgagcctgtgctcgccctgcccaacgcagacagccagacccagggcggcccctctggcggctctgctcctcccgaaggatgcttggggagtgaggcgaagctgggcgctcctctcccctacagcagcccccttcctccatccctctgttctcctgagccttcaggagcctgcaccagtcctgcctgtccttctactcagctgttacccactctgggaccagcagtctttctgataactgggagagggcagtaaggaggacttcctggagggggtgactgtccagagcctggaactgtgcccacaccagaagccatcagcagcaaggacaccatgcggcttccgggtgcgatgccagctctggccctcaaaggcgagctgctgttgctgtctctcctgttacttctggaaccacagatctctcagggcctggtcgtcacacccccggggccagagcttgtcctcaatgtctccagcaccttcgttctgacctgctcgggttcagctccggtggtgtgggaacggatgtcccaggagcccccacaggaaatggccaaggcccaggatggcaccttctccagcgtgctcacactgaccaacctcactgggctagacacgggagaatacttttgcacccacaatgactcccgtggactggagaccgatgagcggaaacggctctacatctttgtgccagatcccaccgtgggcttcctccctaatgatgccgaggaactattcatctttctcacggaaataactgagatcaccattccatgccgagtaacagacccacagctggtggtgacactgcacgagaagaaaggggacgttgcactgcctgtcccctatgatcaccaacgtggcttttctggtatctttgaggacagaagctacatctgcaaaaccaccattggggacagggaggtggattctgatgcctactatgtctacagactccaggtgtcatccatcaacgtctctgtgaacgcagtgcagactgtggtccgccagggtgagaacatcaccctcatgtgcattgtgatcgggaatgaggtggtcaacttcgagtggacatacccccgcaaagaaagtgggcggctggtggagccggtgactgacttcctcttggatatgccttaccacatccgctccatcctgcacatccccagtgccgagttagaagactcggggacctacacctgcaatgtgacggagagtgtgaatgaccatcaggatgaaaaggccatcaacatcaccgtggttgagagcggctacgtgcggctcctgggagaggtgggcacactacaatttgctgagctgcatcggagccggacactgcaggtagtgttcgaggcctacccaccgcccactgtcctgtggttcaaagacaaccgcaccctgggcgactccagcgctggcgaaatcgccctgtccacgcgcaacgtgtcggagacccggtatgtgtcagagctgacactggttcgcgtgaaggtggcagaggctggccactacaccatgcgggccttccatgaggatgctgaggtccagctctccttccagctacagatcaatgtccctgtccgagtgctggagctaagtgagagccaccctgacagtggggaacagacagtccgctgtcgtggccggggcatgccccagccgaacatcatctggtctgcctgcagagacctcaaaaggtgtccacgtgagctgccgcccacgctgctggggaacagttccgaagaggagagccagctggagactaacgtgacgtactgggaggaggagcaggagtttgaggtggtgagcacactgcgtctgcagcacgtggatcggccactgtcggtgcgctgcacgctgcgcaacgctgtgggccaggacacgcaggaggtcatcgtggtgccacactccttgccctttaaggtggtggtgatctcagccatcctggccctggtggtgctcaccatcatctcccttatcatcctcatcatgctttggcagaagaagccacgttacgagatccgatggaaggtgattgagtctgtgagctctgacggccatgagtacatctacgtggaccccatgcagctgccctatgactccacgtgggagctgccgcgggaccagcttgtgctgggacgcaccctcggctctggggcctttgggcaggtggtggaggccacggctcatggcctgagccattctcaggccacgatgaaagtggccgtcaagatgcttaaatccacagcccgcagcagtgagaagcaagcccttatgtcggagctgaagatcatgagtcaccttgggccccacctgaacgtggtcaacctgttgggggcctgcaccaaaggaggacccatctatatcatcactgagtactgccgctacggagacctggtggactacctgcaccgcaacaaacacaccttcctgcagcaccactccgacaagcgccgcccgcccagcgcggagctctacagcaatgctctgcccgttgggctccccctgcccagccatgtgtccttgaccggggagagcgacggtggctacatggacatgagcaaggacgagtcggtggactatgtgcccatgctggacatgaaaggagacgtcaaatatgcagacatcgagtcctccaactacatggccccttacgataactacgttccctctgcccctgagaggacctgccgagcaactttgatcaacgagtctccagtgctaagctacatggacctcgtgggcttcagctaccaggtggccaatggcatggagtttctggcctccaagaactgcgtccacagagacctggcggctaggaacgtgctcatctgtgaaggcaagctggtcaagatctgtgactttggcctggctcgagacatcatgcgggactcgaattacatctccaaaggcagcacctttttgcctttaaagtggatggctccggagagcatcttcaacagcctctacaccaccctgagcgacgtgtggtccttcgggatcctgctctgggagatcttcaccttgggtggcaccccttacccagagctgcccatgaacgagcagttctacaatgccatcaaacggggttaccgcatggcccagcctgcccatgcctccgacgagatctatgagatcatgcagaagtgctgggaagagaagtttgagattcggccccccttctcccagctggtgctgcttctcgagagactgttgggcgaaggttacaaaaagaagtaccagcaggtggatgaggagtttctgaggagtgaccacccagccatccttcggtcccaggcccgcttgcctgggttccatggcctccgatctcccctggacaccagctccgtcctctatactgccgtgcagcccaatgagggtgacaacgactatatcatccccctgcctgaccccaaacccgaggttgctgacgagggcccactggagggttcccccagcctagccagctccaccctgaatgaagtcaacacctcctcaaccatctcctgtgacagccccctggagccccaggacgaaccagagccagagccccagcttgagctccaggtggagccggagccagagctggaacagttgccggattcggggtgccctgcgcctcgggcggaagcagaggatagcttcctgtagggggctggcccctaccctgccctgcctgaagctccccccctgccagcacccagcatctcctggcctggcctgaccgggcttcctgtcagccaggctgcccttatcagctgtccccttctggaagctttctgctcctgacgtgttgtgccccaaaccctggggctggcttaggaggcaagaaaactgcaggggccgtgaccagccctctgcctccagggaggccaactgactctgagccagggttcccccagggaactcagttttcccatatgtaagatgggaaagttaggcttgatgacccagaatctaggattctctccctggctgacaggtggggagaccgaatccctccctgggaagattcttggagttactgaggtggtaaattaacttttttctgttcagccagctacccctcaaggaatcatagctctctcctcgcactttttatccacccaggagctagggaagagaccctagcctccctggctgctggctgagctagggcctagccttgagcagtgttgcctcatccagaagaaagccagtctcctccctatgatgccagtccctgcgttccctggcccgagctggtctggggccattaggcagcctaattaatgctggaggctgagccaagtacaggacacccccagcctgcagcccttgcccagggcacttggagcacacgcagccatagcaagtgcctgtgtccctgtccttcaggcccatcagtcctggggctttttctttatcaccctcagtcttaatccatccaccagagtctagaaggccagacgggccccgcatctgtgatgagaatgtaaatgtgccagtgtggagtggccacgtgtgtgtgccagtatatggccctggctctgcattggacctgctatgaggctttggaggaatccctcaccctctctgggcctcagtttccccttcaaaaaatgaataagtcggacttattaactctgagtgccttgccagcactaacattctagagtattccaggtggttgcacatttgtccagatgaagcaaggccatataccctaaacttccatcctgggggtcagctgggctcctgggagattccagatcacacatcacactctggggactcaggaaccatgccccttccccaggcccccagcaagtctcaagaacacagctgcacaggccttgacttagagtgacagccggtgtcctggaaagccccaagcagctgccccagggacatgggaagaccacgggacctctttcactacccacgatgacctccgggggtatcctgggcaaaagggacaaagagggcaaatgagatcacctcctgcagcccaccactccagcacctgtgccgaggtctgcgtcgaagacagaatggacagtgaggacagttatgtcttgtaaaagacaagaagcttcagatggtaccccaagaaggatgtgagaggtggccgcttggagtttgcccctcacccaccagctgccccatccctgaggcagcgctccatgggggtatggttttgtcactgcccagacctagcagtgacatctcattgtccccagcccagtgggcattggaggtgccaggggagtcagggttgtagccaagacgcccccgcacggggagggttgggaagggggtgcaggaagctcaacccctctgggcaccaaccctgcattgcaggttggcaccttacttccctgggatccccagagttggtccaaggagggagagtgggttctcaatacggtaccaaagatataatcacctaggtttacaaatatttttaggactcacgttaactcacatttatacagcagaaatgctattttgtatgctgttaagtttttctatctgtgtacttttttttaagggaaagatttt

SEQ ID NO: 582 - DNA, 461 bp, Homo sapiens
tttgagtgagaagcaccaggtttaatattaaaatctttcccttaaaaaaaagtacacagatagaaaaacttaacagcatacaaaatagcatttctgctgtataaatgtgagttaacgtgagtcctaaaaatatttgtaaacctaggtgattatatctttggtaccgtattgagaacccactctccctccttggaccaactctggggatcccagggaagtaaggtgccaacctgcaatgcagggttggtgcccagaggggttgagcttcatgcacccccttcccaaccctccccgtgcggggtcgtcttggctacaaccctgactcccctggcacctccaatgcccactggcgtggggacaatgagatgtcactgctaggtctgggcagtgacaaaaccatacccccatggagcgctgcctcagggatggggcagctggtgggtgaggggcaaacctccaaa

SEQ ID NO: 583 - DNA, 446 bp, Homo sapiens
gcttcagatgggtaccccaagaaggatgtgagaggtgggcgctttggaggtttgcccctcacccaccagctgccccatccctgaggcagcgtccatgggggtatggttttgtcactgcccagacctagcagtgacatctcattgtccccagcccagtgcgattggaggtgccaggggagtcagggttgtagccaagacgcccccgcacgggagggttgggaagggggtgcatgaagctcaacccctctgggcaccaaccctgcattgcagtttggcaccttacttccctgggatccccagagttggtccaaggagggagagtgggttctcaatacggtaccaaagatataatcacctaggtttacaaatatttttagcgctcacgttaactcacatttatacagcagaaatgctattttgtatgctgttaagtttttctatctgtg

SEQ ID NO: 584 - DNA, 3120 bp, Homo sapiens
ggggccgagccctccgcgacgccacccgggccatgggggccgcacgcagcccgccgtccgctgtcccggggcccctgctggggctgctcctgctgctcctgggcgtgctggccccgggtggcgcctccctgcgactcctggaccaccgggcgctggtctgctcccagccggggctaaactgcacggtcaagaatagtacctgcctggatgacagctggattcaccctcgaaacctgaccccctcctccccaaaggacctgcagatccagctgcactttgcccacacccaacaaggagacctgttccccgtggctcacatcgaatggacactgcagacagacgccagcatcctgtacctcgagggtgcagagttatctgtcctgcagctgaacaccaatgaacgtttgtgcgtcaggtttgagtttctgtccaaactgaggcatcaccacaggcggtggcgttttaccttcagccactttgtggttgaccctgaccaggaatatgaggtgaccgttcaccacctgcccaagcccatccctgatggggacccaaaccaccagtccaagaatttccttgtgcctgactgtgagcacgccaggatgaaggtaaccacgccatgcatgagctcaggcagcctgtgggaccccaacatcaccgtggagaccctggaggcccaccagctgcgtgtgagcttcaccctgtggaacgaatctacccattaccagatcctgctgaccagttttccgcacatggagaaccacagttgctttgagcacatgcaccacatacctgcgcccagaccagaagagttccaccagcgatccaacgtcacactcactctacgcaaccttaaagggtgctgtcgccaccaagtgcagatccagcccttcttcagcagctgcctcaatgactgcctcagacactccgcgactgtttcctgcccagaaatgccagacactccagaaccaattccggactacatgcccctgtgggtgtactggttcatcacgggcatctccatcctgctggtgggctccgtcatcctgctcatcgtctgcatgacctggaggctagctgggcctggaagtgaaaaatacagtgatgacaccaaatacaccgatggcctgcctgcggctgacctgatccccccaccgctgaagcccaggaaggtctggatcatctactcagccgaccaccccctctacgtggacgtggtcctgaaattcgcccagttcctgctcaccgcctgcggcacggaagtggccctggacctgctggaagagcaggccatctcggaggcaggagtcatgacctgggtgggccgtcagaagcaggagatggtggagagcaactctaagatcatcgtcctgtgctcccgcggcacgcgcgccaagtggcaggcgctcctgggccggggggcgcctgtgcggctgcgctgcgaccacggaaagcccgtgggggacctgttcactgcagccatgaacatgatcctcccggacttcaagaggccagcctgcttcggcacctacgtagtctgctacttcagcgaggtcagctgtgacggcgacgtccccgacctgttcggcgcggcgccgcggtacccgctcatggacaggttcgaggaggtgtacttccgcatccaggacctggagatgttccagccgggccgcatgcaccgcgtaggggagctgtcgggggacaactacctgcggagcccgggcggcaggcagctccgcgccgccctggacaggttccgggactggcaggtccgctgtcccgactggttcgaatgtgagaacctctactcagcagatgaccaggatgccccgtccctggacgaagaggtgtttgaggagccactgctgcctccgggaaccggcatcgtgaagcgggcgcccctggtgcgcgagcctggctcccaggcctgcctggccatagacccgctggtcggggaggaaggaggagcagcagtggcaaagctggaacctcacctgcagccccggggtcagccagcgccgcagcccctccacaccctggtgctcgccgcagaggagggggccctggtggccgcggtggagcctgggcccctggctgacggtgccgcagtccggctggcactggcgggggagggcgaggcctgcccgctgctgggcagcccgggcgctgggcgaaatagcgtcctcttcctccccgtggaccccgaggactcgccccttggcagcagcacccccatggcgtctcctgacctccttccagaggacgtgagggagcacctcgaaggcttgatgctctcgctcttcgagcagagtctgagctgccaggcccaggggggctgcagtagacccgccatggtcctcacagacccacacacgccctacgaggaggagcagcggcagtcagtgcagtctgaccagggctacatctccaggagctccccgcagccccccgagggactcacggaaatggaggaagaggaggaagaggagcaggacccagggaagccggccctgccactctctcccgaggacctggagagcctgaggagcctccagcggcagctgcttttccgccagctgcagaagaactcgggctgggacacgatggggtcagagtcagaggggcccagtgcatgagggcggctccccagggaccgcccagatcccagctttgagagaggagtgtgtgtgcacgtattcatctgtgtgtacatgtctgcatgtgtatatgttcgtgtgtgaaatgtaggctttaaaatgtaaatgtctggattttaatcccaggcatccctcctaacttttctttgtgcagcggtctggttatcgtctatccccaggggaatccacacagcccgctcccaggagctaatggtagagcgtccttgaggctccattattcgttcattcagcatttattgtgcacctactatgtggcgggcatttgggataccaagataaattgcatgcggcatggccccagccatgaaggaacttaaccgctagtgccgaggacacgttaaacgaacaggatgggccgggcacggtggctcacgcctgtaatcccagcacactgggaggccgaggcaggtggatcactctgaggtcaggagtttgagccagcctg

SEQ ID NO: 585 - DNA, 431 bp, Homo sapiens
agggagcagggcagtaaagctgaggacgcggccaaggcacaggctggaaggcgcgggccactgagctgtttgctgtctagctgtctgtacctgctgctggggcatctcagggtctcggctataagtctctgaatgttgcttttccctggctgccaggtacctgcctggatgacagctggattcaccctcgaaacctgaccccctcctccccaaaggacctgcagatccagctgcactttgcccacacccaacaaggagacctgttccccgtggctcacatcgaatggacactgcagacagacggtgagtgggcatgcagcagggcctgggggattctccctgcctccaagtggctctcccagtcaggctcaggattgggctccagtcctgtgctcagacatgggggttcaatttagtgctataaggatccg

SEQ ID NO: 586 - DNA, 5898 bp, Homo sapiens
cacacaacaaacttagctcatcgcaataaaaagcagctcagagccgactggctcttttaggcactgactccgaacaggattctttcacccaggcatctcctccagagggatccgccagcccgtccagcagcaccatgtgggtgaccaaactcctgccagccctgctgctgcagcatgtcctcctgcatctcctcctgctccccatcgccatcccctatgcagagggacataagaaaagaagaaatacaattcacgaattcaaaaaatcagcaaagactaccctaatcaaaatagatccagcactgaagataaaaaccaaaaaagtgaatactgcagaccaatgtgctaatagatgtactaggaataatggacttccattcacttgcaaggcctttgtttttgataaagcgagaaaacaatgcctctggttccccttcaatagcatgtcaagtggagtgaagaaagaatttggccatgaatttgacctctatgaaaacaaagactacattagaaactgcatcatcggtaaaggacgcagctacaagggaacagtatctatcactaagagtggcatcaaatgtcagccctggagttccatgataccacacgaacacagctttttgccttcgagctatcggggtaaagacctacaggaaaactactgtcgaaatcctcgaggggaagaagggggaccctggtgtttcacaagcaatccagaggtacgctacgaagtctgtgacattcctcagtgttcagaagttgaatgcatgacctgcaatggggagagttatcgaggtctcatggatcatacagaatcaggcaagatttgtcagcgctgggatcatcagacaccacaccggcacaaattcttgcctgaaagatatcccgacaagggctttgatgataattattgccgcaatcccgatggccagccgaggccatggtgctatactcttgaccctcacacccgctgggagtactgtgcaattaaaacatgcgctgacaatactgtaaatgatactgatgttcctatggaaacaactgaatgcatccaaggtcaaggagaaggctacaggggcactgccaataccatttggaatggaattccatgtcagcgttgggattctcagtatcctcacaagcatgacatgactcctgaaaatttcaagtgcaaggacctacgagaaaattactgccgaaatccagatgggtctgaatcaccctggtgttttaccactgatccaaacatccgagttggttactgctcccaaattccaaactgtgatatgtcaaatggacaagattgttatcgtgggaatggcaaaaattatatgggcaacttatcccaaacaagatctggactaacgtgttcaatgtggaacaagaacatggaagacttacaccgtcatatcttctgggaaccagatgcaagtaagctgaatgagaattactgccgaaatccagatgatgatgctcatggaccctggtgctacacgggaaatccactcattccttgggattattgccctatttctcgttgtgaaggtgataccacacctacaatagtcaatttagaccatcctgtaatatcttgcgccaaaacgaaacaactgcgagttgtaaatgggattccaacacgaacaaatgtaggatggatgattagtttgagatacagaaataaacatatctgcggaggatcattgataaaggaaagttgggttcttactgcacgacagtgtttcccttctcgagacttgaaagattatgaggcttggcttggaattcatgatgtccatggaagaggagaggagaaacgcaaacaggttctcaatgtttcccagctggtatatggccctgaaggatcagatctggttttaatgaagcttgccagacctgctgtcctggatgattttgttaatacaattgatttacctaattatggatgcacaattcctgaaaagaccagttgcagtgtttatggctggggctacactggattgatcaactatgatggtctattacgagtggcacatctctatataatgggaaatgagaaatgcagccagcatcaccgagggaaggtgactctgaatgagtctgaaatatgtgctggggctgagaagattggatcaggaccatgtgagggggattatggtggcccacttgtttgtgagcaacataaaatgagaatggttcttggtgtcattgttcccggccgtggatgcgccattccaaatcgtcctggtatttttgtccgagtagcatattatgcaaaatggatacacaaaattattttaacatataaggtaccacagtcatagctgaagtaagtgtgtctgaagcacccaccaatacaactgtcttttacatgaagatttcagagaatgtggaattaaaaataccacttacaacaatcctaagacaactactggagagtcatgtttgttaaaattctcattaatgtttatgggtgttttctgttgttttgtttgtcagtgttattttgtcaatgttgaagtgaattaaggtacatgcaagtgtagtaacatatctcctgaagatacttgaatggattaaaaaaacacacaggtataattgctggataaagattttgtggggaaaaaatcaattaatctctctaagctgctttctgaggttggtttcttaataatgagtaaaccataaattaaatgttattttaacctcaccaaaacaatttataccttgtgtccttaaattgtaccctatattaaattatattacatttcatatgctatatgttatagttcattcatttctcttcaccatgtatcctgcaatactggtacacgaacacactttttacaaaaccacatacccatgtacacatgcctaggtacacatgtacatgcactacagtttaaattatgatgtacttaatgtaacctctaaatattttagaagtatgtacctatagttttacctcaaaaaaatagaaatctctaaagaccagtagaaatattaaaaaatgatgcaaaatcaaaatgagtggctaattctccatacgtaatctgcagatgatcttctctggttgacattttacgtgtggccatcaccccgggttaaataacacctaatctaggtgtttacatgtattcaatatcctagtttgtttcatgtagtttctaattcttaaaggaaagagggtaataattctatttgtgtaatttgtttcctccaaacttaaggccacttatttacacaagatatttgtatgtctactttcctaaagcatttcttcagtgctcagatcagtgtctaattgaagaagattaaaactgctttggtcattaaaaacgtatttaaataggttaattctaagacttgctgctgtgattgacttctagctcactgcctttaaattttaaaaaatttaagaggaaaattttcatgtctccaaagttttataaatacccttcatcaagtcatgcattaaagtatatattagagaaaaaaaaatacttttctcaacctggaagattttagcctaataaagtttttttgaagtaaaagaaaacttgtaaagggaaagaaactagtttgtctaaactctgtattcattttttttttttttgaagtacagtggaatctgttgaatcagatattttatcaagatatctttattttttcttatttcatttttacaaagatcactcccaatgccatatgtaatagacatttaaatttcgtgttctgtatgacagccaaatgatcatatttatcattgtatttgtcatgtttagctaaaaatcatgtattgttgagaaatagaataacaaaaagtaataggataggctttgaatttttgcaaaaaatcttcctgtacaaaacatctttaaaaataattttttgagtggtgtgaatctagtattcccatttctctgatttagttttcttgagtgatttttatcaaggctaagtccccaaatgattccctaacagctctttagaataccgtttaatctggactaaaatggttttaagtttatggagagtttagtccacagaactaactggacttctggcggcaagtccagaaatgcttatacaaatttttttttcataataagatatgtgctggtatcaaggaacttaaagtggaagcaaaaagacatccaagtagttgctagtctccatcatcttatctgattgtatttctcttttccttatataatacaccattttcataagaacacctagaaatttcaagagtatattgccaaaatataaagtatatttcctagtttcttctggctgaaccagtgaaattttattgttgcatattaatgatatttttaaaacttttataaaaattgtcatacttttaaatactcacattttaaaaatacttcttttatgactcttcctctaaatttcctggaaatacagataaagattagctagatacaagatgcagctaagtatttagacattttgagcccagtatttttcattttattaaaggctaaaaacaataccaccaataaatcatcaaacaaactgtacaaaataattctgtctttgggaggctccttttgtgatagagggacatgggtggaattgacaatgaaagttagatgaacaaggtccgtgttattttaggtagtagaacagggtagagtcatgtcattatttgcgggcggaagatactatttaccacgtgttctttgctgaatcaattattaaacatttttaaaaatccaattatccactttattttgtgtcattgacaaaaggatcttttaagtcagaggtttcaatgtgatttttggcttggctgtttgaataatggttatgtactgttataattgtagacattttctcatgtctaccaggaattgaagtgtaaaactaaaatatttttcataatgcctctgccgtgcggaaggaatgataatccttttgtatacttctttaattttattgtaaaatgtgtaatgacttttacctatatgctgtgggcaggtcctcagtaaaatctattgagtcaatttctagtattaataggcttttgcttgctatctaagtgtttcaaattatgggaagtgtgagacactggaaggcaagaaaattaacaataatggcatgtgatagcaaaattgtatttcacttattcctgtgaatatttcttgttggtaccaatggtactgtacaaagtgaatgttatagccacaacattctcttgaaaagaacactgtcaagaagtgggaaattgctgtcaggcatttcgttgttgtttttaaactttttaaaaaagaaatactggttttgcaagatagagatcatgaggtaaataattttaataagctcttatactaaaaagccttaaatcgatttactgagattcaaaacatactattataatcaattatatcccatatatgtaggcaaactcatttaaaaaataaaattaattttggtaaaagtacatagtgtttgtttttaaaatacataattttaaaataaatcgcttgtcatgataaagtccaaaaagaagttatctttcaatattcaactaagtttggagctaagaatttactaatacaaaaaaaagttaaaatgttttggaccatatatatcttgacagtgtaacttttaagtaggctcatttccatttgcacagaaagtttctgtctttaggaaactgaaaatgaaatactgtggatgttatgactgtttgtcttctatgtaaataggaaattaataagctgcctattgagtggtatagctgtatgcttacccaaaaaagggaacactgtggttatgacttgtattataaactttctgtagttaataaagttgttatttttataaccatgattatatattattattaataaaatattttatcgaaatgct

SEQ ID NO: 587 - DNA, 354 bp, Homo sapiens
gataaaatattttattaataataataatataatcatggttataaaaataacaactttattaactacagaaagtttataatacaagtcataaccacagtgttcccttttttgggtaagcatacagctataccactcaataggcagcttattattttcctatttacatacaagacaaacagtcatagcatccacagtatttcattttcagtttcctaaagacagaaactttctgtgcaaatggaaatgaacctacttaaaagttacactgtcaagatatatatggtccaaaaaattttaactttttttgtattagtagattcttagctccaaccttagttgaatgttgaatgataa

SEQ ID NO: 588 - DNA, 953 bp, Homo sapiens
cgtggtcgacggcccgggctggtctgtgccttgactacgtaacatcttgtcctcacagcccagagcatgttccagatcccagagtttgagccgagtgagcaggaagactccagctctgcagagaggggcctgggccccagccccgcaggggacgggccctcaggctccggcaagcatcatcgccaggccccaggcctcctgtgggacgccagtcaccagcaggagcagccaaccagcagcagccatcatggaggccgctggggctgtggagatccggagtcgccacagctcctaccccgcggggacggaggacgacgaagggatgggggaggagcccagccctttcggggccgctcgcgctcggcgccccccaacctctgggcagcacagcgctatggccgcgagctccggaggatgagtgacgagtttgtggactcctttaagaagggacttcctcgcccgaagagcgcgggcacagcaacgcagatgcggcaaagctccagctggacgcgagtcttccagtcctggtgggatcggaacttgggcaggggaagctccgccccctcccagtgaccttcgctccacatcccgaaactccacccgttcccactgccctgggcagccatcttgaatatgggcggaagtacttccctcaggcctatgcaaaaagaggatccgtgctgtctcctttggagggagggctgacccagattcccttccggtgcgtgtgaagccacggaaggcttggtcccatcggaagttttgggttttccgcccacagccgccggaagtggctccgtggccccgccctcaggctccgggctttcccccaggcgcctgcgctaagtcgcgagccaggtttaaccgttgcgtcaccgggacccgagcccccgcgatgccctgggggcccgtgctcactaccaaatgttaataaagcccgcgtctgtgccgcc

SEQ ID NO: 589 - DNA, 693 bp, Homo sapiens
  misc_feature (1)..(693): "n" represents an unknown nucleotide
cctaggggaaagcccggagcctgagggggggccacggagccacttccggcggctgtgggcggaaaacccaaaacttccgatgggaccaagccttccgtggcttcacacgcaccggaaggaatctgggtcagccctccctccaaaggagacagcacggatcctctttttgcataggcctgagggaagtacttccgcccatattcaagatggctgcccagggcagtgggaacgggtggagtttcgggatgtggagcgaaggtcactgggagggggcggatttcccctgcccaagttccgatcccaccaggactggaagactcgcgtccagctggagctttgccgcatctgcgttgctgtgcacgcgctcttcgggcgaggaagtcccttcttaaaggagtccacaaactcgtcactcatcctccggagctcgcggccatagcgctgtgctgcccaaaggtttgggggcgacgagcgaagggcacccgaaaaggggganctcctcacccatcacttcgtcgtcctacgttcccgaggggtaggagttttggacttccggatcttcacagcccaaggccatccatgatggttgctgtggttgggttgctcctgctgtgaattgggtacaccaagagagcccgggctggncgaatattaattttccgaacataaagggccttccccttggcgtgaggg

SEQ ID NO: 590 - DNA, 3595 bp, Homo sapiens
aacgctttttgaattgaattttttaaaatgcatgtattccttttcaaactaaaatgatttttaagcacacaaaagagaatcaaaggctgagaaacaatgatttcacacactatgtttgcaagaacaagttattcccaaagcaattcctacaggttctgcacctgtgttgcttttataaagcaagcacagcgtaatgtgtaagcactattgtcctgaatgctttatccatgaaggtacgtgttaaggatccataactggtagaagggcgtttaaaacgcttttttttcttttaaagagacagggtctcactatgttgcccaggctgctctcttaactacgaggctcggagtcaggaatggagagaagggtaatggttttacctcttattgtggaaacctgttgagatcacagagaatatactgacggcataaaagggcagaaccatagcagggtgcgcgctgctgtagttgccttccatggatctataggagagcaagtcctccaggagaagaagtcctcaccagtgaacggagacctctctgaactaaggataccatggccacgtcagccccactacggagcctggaagaggaggtgacctgctccatctgtcttgattacctgcgggaccctgtgaccattgactgtggccacgtcttctgccgcagctgcaccacagacgtccgccccatctcagggagccgccccgtctgcccactctgcaagaagccttttaagaaggagaacatccgacccgtgtggcaactggccagcctggtggagaacattgagcggctgaaggtggacaagggcaggcagccgggagaggtgacccgggagcagcaggatgcaaagttgtgcgagcgacaccgagagaagctgcactactactgtgaggacgacgggaagctgctgtgcgtgatgtgccgggagtcccgggagcacaggccccacacggccgtcctcatggagaaggccgcccagccccacagggaaaaaatcctgaaccacctgagtaccctaaggagggacagagacaaaattcagggcttccaggcaaagggagaagctgatatcctggccgcgctgaagaagctccaggaccagaggcagtacattgtggctgagtttgagcagggtcatcagttcctgagggagcgggaggaacacctgctggaacagctggcgaagctggagcaggagctcacggagggcagggagaagttcaagagccggggcgtcggggagcttgcccggctggccctggtcatctccgaactggagggcaaggcgcagcagccagctgcagagctcatgcaggacacgagagacttcctaaacaggtatccacggaagaagttctgggttgggaaacccattgctcgagtggttaaaaaaaagaccggagaattctcagataaactcctctctctgcaacgaggcctgagggaattccaggggaagctgctgagagacttggaatataagacagtgagcgtcaccctggacccacagtcggccagtgggtacctgcagctgtcagaggactggaagtgcgtgacctacaccagcctgtacaagagtgcctacctgcacccccagcagtttgactgtgagcctggggtgctgggcagcaagggcttcacctggggcaaggtctactgggaagtggaagtggagagggagggctggtctgaggatgaagaagagggggatgaggaggaagagggagaagaggaggaggaggaagaggaggccggctatggggatggatatgacgactgggaaacggacgaagatgaggaatcgttgggcgatgaagaggaagaagaggaggaggaagaggaggaagttctggaaagctgcatggtgggggtggctagagactctgtgaagaggaagggagacctctccctgcggccagaggatggcgtgtgggcgctgcgcctctcctcctccggcatctgggccaacaccagccccgaggctgagcttttcccagcactgcggccccggagagtgggcatcgccctggattatgaagggggcaccgtgactttcaccaacgcagagtcacaggaactcatctacaccttcactgccaccttcacccggcgcctggtccccttcctgtggctcaagtggccaggaacacgcctcctgctaagaccctgagccctgacatctgcccccagccccaaccctcagatgcttcacttctttggaattccaggactctcaatggggggacgggatgcctggcctaagcacctggagcaggggaccccatatccactggtagccacctccccattgctgtggccccctgaaatctcactcagtgctgttgctccatctactgccctaatggggctcttttcccacctcctgctggtttcccgagggaacttctgaccctggagtccatgagggctcctttcctttttgaccacgaccttggccccagctctgcactctctggaataagggcccgatgcagcattttcttgcccagtgtggcaagacctcagaaaaaccagtcaattacgcctaagatcattttgctgtccttaaaccccccaggttccttcttgcacaaatccactctgctgcccaccttccctggcattttaaacagacctaccccaccccaactcagagttaagcatacatggcaatgctgaaaataaacaaaatccactgaggcttcccaggccatttaaagcctggagtaccagcgcatatcatctcatggggtccagagtggagtccaggcttctctgaaaccagggctgagcatatttccatagccaaggaggtgggactccctggagctatctgtggtcttagggaaggatccagacatacacggctttggggtacaagctgtgatcactgatcaataaattatctctagattggtccttgtgaggggagttttaagaatccagaacatcttgctcttgatcagcacatccaaaaacaccaagacaaacatccagtggagcagaacctctcctgcctcgggagttctgaccaggttccccagcagggtgttaagcctctgtctctggccctaccagcatccaggttccactttcctaggagagagtggagatgggaagacagggaaaggaaggcagcaggaggccacaagcccaccaggtcttcatgtcaagagagggagtaacatgtcttctcattgcccacggacccaacctctgtccaggtgcccctcatcatcacagtttaacacaagctcccctgctccagccaaattgatctcccagtcttgtccttacccattccaagtgctctgccagcccctgttcatccaagttttaagtcctccaccctgttctaagagactgttccaacggctctgggcctcagtggtcacttgaccaccattgtctcagagctgcccactttgtgtgtgtcacatgctgcctgagtcacacgtacatcttatttctgcctctagttttgtaagctcctggagggcggataacatcttatactactcttgtattctcatggcacctagtgcagtgctgggcacagagtaggtgctcaataaagacttgttgaatga

SEQ ID NO: 591 - DNA, 516 bp, Homo sapiens
tttttcattcaacaagtctttattgagcacctactctgtgcccagcactgcactaggtgcatgagaatacaagagtagtataagatgttatccgccctccaggagcttacaaaactagaggcagaaataagatgtacatgtgactcaggcagcatgtgacacacacaaagtgggcagctctgagacaatggtggtcaagtgaccactgaggcccagagccgttggaacagtctcttagaacaggggggaggacttaaaacttggatgaacaggggctggcagagcacttggaatgggtaaggacaagactgggagatcaatttggctggagcttgggagcttgtgttaaactgtgatgatgaggggcaccgggacagaggttgggtccgtgggcaatgagaagacatgttactccctctcttgacatgaagacctggtgggcttgtgggctcctgctgccttcctttccctgtcttcccatctccactctctcctaggaaagtggaacctggatgc

SEQ ID NO: 592 - DNA, 569 bp, Homo sapiens
ctcactcagtgctgttgctccatctactgccctaatggggctacttttcccacctcctgctggtttcccgagggaacttctgaccctggagtccatgagggctcctttcctttttgaccacgaccttggccccagctctgcactctctggaataagggcccgatgcagcattttcttgcccagtgtggcaagacctcagaaaaaccagtcaattacgcctaagatcattttgctgtccttaaaccccccaggttccttcttgcacaaatccactctgctgcccaccttccctggcattttaaacagacctaccccaccccaactcagagttaagcatacatggcaatgctgaaaataaacaaaatccactgaggcttcccaggccatttaaagcctggagtaccagcgcatatcatctcatggggtccagagtggagtccaggcttctctgaaaccagggctgagcatatttccatagccaaggaggtgggactccctggagctatctgtggtcttagggaaggatccagacatacatggctttggggtacaagctgtgatcactgatc

SEQ ID NO: 593 - DNA, 2896 bp, Homo sapiens
ctgatcagagttattctgatctgaagattttgggcgttcaaggcattaagataatagcctgagttgttcatggagtttttcatcagtatgtctgaaaccattaaatataatgacgatgatcataaaactctgtttctgaaaacactaaatgaacaacgcctggaaggagaattttgtgatattgctattgtggttgaggatgtgaaattcagagcacacagatgtgttcttgctgcctgcagcacctactttaaaaagcttttcaagaagcttgaggttgatagttcttcggtcatagaaatagattttcttcgttctgatatatttgaagaggtcctgaactacatgtacacagcaaagatttccgtgaaaaaagaagatgttaacttaatgatgtcatcgggtcagattcttggtatccgatttttggataaactgtgttctcagaagcgtgatgtgtccagtcccgatgaaaacaatggtcagtccaaaagtaagtattgccttaaaataaatcgccccattggagatgctgctgacacccaggatgatgatgtagaggaaatcggggatcaggatgacagtccttctgatgacacagtagaaggcacacccccgagtcaggaggacggcaagtcgcccaccacaacgctcagggttcaggaagcgatcctgaaagagctggggagtgaggaagttcggaaggtcaattgctacggccaggaagtagaatccatggagaccccagaatcaaaagacttggggtcccagacccctcaagccttaacatttaatgatgggatgagtgaagtgaaagatgaacagacaccaggctggacaacagccgccagtgacatgaagtttgagtatttgctttatggtcaccatcgggagcagattgcctgccaggcgtgtgggaagacgttttctgatgaaggcagattgaggaagcatgagaaactccacacggcggacaggccatttgtttgtgaaatgtgcacaaaaggtttcaccacacaggcccacctgaaagaacacctaaaaatccacacaggatataagccctatagctgtgaggtgtgtggaaaatcatttatccgtgccccagacttaaagaagcatgagagagttcacagtaatgaaagaccgtttgcgtgccacatgtgtgacaaagccttcaaacacaagtctcacctcaaggatcatgaaagaagacacagaggggaaaagccttttgtgtgtggctcctgcaccaaggcatttgccaaggcatctgatctgaaaaggcacgagaacaatatgcacagtgaaaggaagcaggttacccccagtgccatccagagcgagacagaacagttgcaggcggcagcgatggctgcggaagcagaacagcagctggagacgatagcctgtagctagaggcggtgggacagggacactttgcctggaaagtggagactgagatgacgtggatcataatgagtgaatgccagttacaatatttttgtggaaacgtatgaacattgtactcactggacttaaggcagtgcttggttagctatttttaagacttttcaaggaaatggtgttcctcagttctgaccaaaccgtttcactgtcttgtctggtgtctagtattaatgttgccagtaagcacctctctccctttttttttttttattattttaatttgagaactcctgtgtccagtttagaagtgagagacttccatttttagttcctttacactcaccaccctagcaagtgccctgcacagagtaataagtaaattgatttcctaatcacaattctatgtgacttatggtcaaaagagcagttttaataactttaaaagtacttcagatagacgcagaaaattggtgagtggttgaccaagaacactgcacaaatataaaaaaagttctggaaatgcagaagggcgttagatttatatttggtttgttaattttatatcactgtttttcactgtttttgtggacaaataatggttgctttgctgaagtgttcttcctcaatcttgattgccctgtacctacccaaaagctgtagtcacacgtcctaaaggccaagcaaacccaccgggatggtggggggtcttggagccaagctcttaggttcctcttatttggggcagtaccagtccataccagctgcgatttgtgagtggacctgtggtaagaagaatagaaaaggctctcagagataaggttttttacatgtgtaacaatcccaagatttcctagattaaaatcttaattgattttgaaattggatttttatttagaatcaaaattaggacaagaacagataacttcttcagatacatttgtgtaactttacagaatgtcatcaagctttggggctctgtggggcacatgatttatccataaaggagatgcagtatgcttacttaaattaataaatttaaaatcttttaagtgtgtaaatagtagtgttggtcttacgtattccaagtaaaaagtagacagctgcactttttttgcacattggattaaaataacttccatcagcaacaaacatcagactgtttttaacaaatattaaagattgtcagaccaaatgtttatgttttcgaaatatatttcatcactggttacagttttaaatagaagttgattgccttttcatagccgtaaatgagaattataaactctattccagttttggtatactaaatgttcttttaaccatctttaggaatatattgaaatgccaacaatagtttgaattgtgttctgtaaaaaagtattagtcaattatttttcaaaatgtagaattgtagaaaatgtcaatttttcaaactcatttttcattgctaggatttcttttaaaaaaattaaagtaatttcacttc

SEQ ID NO: 594 - DNA, 442 bp, Homo sapiens
  misc_feature (1)..(442): "n" represents an unknown nucleotide
tatgaagtgaaattactttaatttttttaaaagaaatcctagcaatgaaaaatgagtttgaaaaattgacattttctacaattctacattttgaaaaataattgactaatacttttttacagaacacaattcaaactattgttggcatttcaatatattcctaaagatggttaaaagaacatttagtataccaaaactggaatagagtttataattctcatttacggctatgaaaaggcaatcaacttctatttaaaactgtaaccagtgatgaaatatatttcgaaaacataaacatttggtctgacaatctttaatatttgttaaaaacagtctgatgtttgttgccgatggaagttattttaatcccatgtggcaaaaaaagtgcagctgtctacttttttacctgaaanacgtaggaccagcactaccaatttccngg

SEQ ID NO: 595 - DNA, 2383 bp, Homo sapiens
ggggctaccgcgcctttgcttcctggcgcacgcggagcctcctggagcctgccaccatcctgcctactacgtgctgccctgcgcccgcagccatgtgccgcaccctggccgccttccccaccacctgcctggagagagccaaagagttcaagacacgtctggggatctttcttcacaaatcagagctgggctgcgatactgggagtactggcaagtccgagtggggcagtaaacacagcaaagagaatagaaacttctcagaagatgtgctggggtggagagagtcgttcgacctgctgctgagcagtaaaaatggagtggctgccttccacgctttcctgaagacagagttcagtgaggagaacctggagttctggctggcctgtgaggagttcaagaagatccgatcagctaccaagctggcctccagggcacaccagatctttgaggagttcatttgcagtgaggcccctaaagaggtcaacattgaccatgagacccgcgagctgacgaggatgaacctgcagactgccacagccacatgctttgatgcggctcaggggaagacacgtaccctgatggagaaggactcctacccacgcttcctgaagtcgcctgcttaccgggacctggctgcccaagcctcagccgcctctgccactctgtccagctgcagcctggacgagccctcacacacctgagtctccacggcagtgaggaagccagccgggaagagaggttgagtcacccatccccgaggtggctgcccctgtgtgggaggcaggttctgcaaagcaagtgcaagaggacaaaaaaaaaaaaaaaaaaaaaaaaaatgcgctccagcagcctgtttgggaagcagcagtctctccttcagatactgtgggactcatgctggagaggagccgcccacttccaggacctgtgaataagggctaatgatgagggttggtggggctctctgtggggcaaaaaggtggtatgggggttagcactggctctcgttctcaccggagaaggaagtgttctagtgtggtttaggaaacatgtggataaagggaaccatgaaaatgagaggaggaaagacatccagatcagctgttttgcctgttgctcagttgactctgattgcatcctgttttcctaattcccagactgttctgggcacggaagggaccctggatgtggagtcttcccctttggccctcctcactggcctctgggctagcccagagtcccttagcttgtacctcgtaacactcctgtgtgtctgtccagccttgcagtcatgtcaaggccagcaagctgatgtgactcttgccccatgcgagatatttatacctcaaacactggcctgtgagccctttccaagtcagtggagagccctgaaaggaggctcacttgaatccagctcagtgctctgggtggccccctgcaggtggcccctgaccctgcgttgcagcagggtccacctgtgagcaggcccgccctggggcctcttcctggatgtgccctctctgagttctgtgctgtctcttggaggcagggcccaggagaacaaagtgtggaggcctcggggagtggcttttccagctctcatgccccgcagtgtggaacaaggcagaaaaggatcctaggaaataagtctcttggcggtccctgagagtcctgctgaaatccagccagtgttttttgtggtatgagaacaggcaaaaagagatgccccgagatagaaggggagccttgtgtttctttcctgcagacgtgagatgaacactggagtgggcagaggtggcmcaggaccatggcacccttagagtgcagaagctggggggagaggctgcttcgaagggcaggactggggatacctgcctgtcacctcagggcatcactgaacaaacatttcctgatggsaactcctgcggcagagcccaggctggggaagtgaactacccagggcagcccctttgtggcccaggataatcaacactgttctctctgtaccatgagctcctccaggagattatttaagtgtattgtatcattggttttctgtgattgtcataacattgtttttgttattgttggtgctgttgttatttattattgtaatttcagtttgcctctactggagaatctcagcaggggtttcagcctgactgtctccctttctctaccagactctacctctgaatgtgctgggaacctcttggagcctgtcaggaactcctcactgtttaaatatttatttattgtgacaaatggagctggtttcctagatatgaatgatgtttgcaatccccattttcctgtttcagcatgttatattcttataaaataaaagcaaaagtcaaatatgaaaaaaaaaaaaaaaaaaaaa

SEQ ID NO: 596 - DNA, 437 bp, Homo sapiens
  misc_feature (1)..(437): "n" represents an unknown nucleotide
catatttgacttttgcttttattttataagaatataacatgctgaaacaggaaaatggggattgcaaacatcattcatatctaggaaaccagctccatttgtcacaataaataaatatttaaacagtgaggagttcctgacaggctccaagaggttcccagcacattcagaggtagagtctggtagagaaagggagacagtcaggctgaaacccctgctgagattctccagtagaggcaaactgaaattacaataataaataacaacagcaccaacaataacaaaaacaatgttatgacaatcacagaaaaccaatngatacaatacacttaaataatctcctggnggagctcatggtacagagagaacagtgttgattatcctggggccacaaaggggctgccctggggtagttcacttccccagcctgggctctg

SEQ ID NO: 597 - DNA, 459 bp, Homo sapiens
  misc_feature (1)..(459): "n" represents an unknown nucleotide
cgagatagaaggggagccttgtgtttctttcctgcagacgtgagatgaacactggagtgggcagaggtggcccaggaccatggcacccttagagtgcagaancngggggganaggctgcttcgnagggcaggactggggannaccanaacctgcctgtcacctcagggcatcactgaacaaacatttcctgatgggaactcctgcngcanagccaggctggggaagtgaactacccagggcagcccctttgtggcccaggataatcaacactgttctctctgtaccatgagctcctccaggagattatttaagtgtattggtatcattgggttntctgtgattgtcataacattgtttttnttattgttggtgctggttgttatttattattgtaatttcagttttgcctcttactggngaattnttaggcaggggnttttcagccttgactnttttcc

SEQ ID NO: 598 - DNA, 3590 bp, Homo sapiens
cctgggtctgacgcggccctgttcgagggggcctctcttgtttatttatttattttccgtgggtgcctccgagtgtgcgcgcgctctcgctacccggcggggagggggtggggggagggcccgggaaaagggggagttggagccggggtcgaaacgccgcgtgacttgtaggtgagagaacgccgagccgtcgccgcagcctccgccgccgagaagcccttgttcccgctgctgggaaggagagtctgtgccgacaagatggcggacggggagctgaacgtggacagcctcatcacccggctgctggaggtacgaggatgtcgtccaggaaagattgtgcagatgactgaagcagaagttcgaggcttatgtatcaagtctcgggagatctttctcagccagcctattcttttggaattggaagcaccgctgaaaatttgtggagatattcatggacaatatacagatttactgagattatttgaatatggaggtttcccaccagaagccaactatcttttcttaggagattatgtggacagaggaaagcagtctttggaaaccatttgtttgctattggcttataaaatcaaatatccagagaacttctttctcttaagaggaaaccatgagtgtgctagcatcaatcgcatttatggattctatgatgaatgcaaacgaagatttaatattaaattgtggaagaccttcactgattgttttaactgtctgcctatagcagccattgtggatgagaagatcttctgttgtcatggaggattgtcaccagacctgcaatctatggagcagattcggagaattatgagacctactgatgtccctgatacaggtttgctctgtgatttgctatggtctgatccagataaggatgtgcaaggctggggagaaaatgatcgtggtgtttcctttacttttggagctgatgtagtcagtaaatttctgaatcgtcatgatttagatttgatttgtcgagctcatcaggtggtggaagatggatatgaattttttgctaaacgacagttggtaaccttattttcagccccaaattactgtggcgagtttgataatgctggtggaatgatgagtgtggatgaaactttgatgtgttcatttcagatattgaaaccatctgaaaagaaagctaaataccagtatggtggactgaattctggacgtcctgtcactccacctcgaacagctaatccgccgaagaaaaggtgaagaaaggaattctgtaaagaaaccatcagatttgttaaggacatacttcataatatataagtgtgcactgtaaaaccatccagccatttgacaccctttatgatgtcacacctttaacttaaggagacgggtaaaggatcttaaatttttttctaatagaaagatgtgctacactgtattgtaataagtatactctgttatagtcaacaaagttaaatccaaattcaaaattatccattaaagttacatcttcatgtatcacaatttttaaagttgaaaagcatcccagttaaactagatgtgatagttaaaccagatgaaagcatgatgatccatctgtgtaatgtggttttagtgttgcttggttgtttaattattttgagcttgttttgtttttgtttgttttcactagaataatggcaaatacttctaatttttttccctaaacatttttaaaagtgaaatatgggaagagctttacagacattcaccaactattattttcccttgtttatctacttagatatctgtttaatcttactaagaaaactttcgcctcattacattaaaaaggaattttagagattgattgttttaaaaaaaaatacgcacattgtccaatccagtgattttaatcatacagtttgactgggcaaactttacagctgatagtgaatattttgctttatacaggaattgacactgatttggatttgtgcactctaatttttaacttattgatgctctattgtgcagtagcatttcatttaagataaggctcatatagtattacccaactagttggtaatgtgattatgtggtaccttggctttaggttttcattcgcacggaacaccttttggcatgcttaacttcctggtaacaccttcacctgcattggttttctttttcttttttctttctttttttttttttttttttttttgagttgttgtttgtttttagatccacagtacatgagaatccttttttgacaagccttggaaagctgacactgtctctttttcctccctctatacgaaggatgtatttaaatgaatgctggtcagtgggacattttgtcaactatgggtattgggtgcttaactgtctaatattgccatgtgaatgttgtatacgattgtaaggcttatgtcactaaagatttttattctgattttttcataatcaaaggtcatatgatactgtatagacaagctttgtagtgaagtatagtagcaataatttctgtacctgatcaagtttattgcagcctttcttttcctatttcttttttttaagggttagtattaacaaatggcaatgagtagaaaagttaacatgaagattttagaaggagagaacttacaggacacagatttgtgattctttgactgtgacactattggatgtgattctaaaagcttttattgagcattgtcaaatttgtaagcttcatagggatggacatcatatctataatgcccttctatatgtgctaccatagatgtgacatttttgaccttaatatcgtctttgaaaatgttaaattgagaaacctgttaacttacattttatgaattggcacattgtattacttactgcaagagatatttcattttcagcacagtgcaaaagttctttaaaatgcatatgtctttttttctaattccgttttgttttaaagcacattttaaatgtagttttctcatttagtaaaagttgtctaattgatatgaagcctgactgattttttttttccttacagtgagacatttaagcacacattttattcacatagatactatgtccttgacatattgaaatgattcttttctgaaagtattcatgatctgcatatgatgtattaggttaggtcacaaaggttttatctgaggtgatttaaataacttcctgattggagtgtgtaagctgagcgatttctaataaaattttagttgtacacttttagtagtcatagtgaagcaggtctagaaaataagcctttggcagggaaaaagggcaatgttgattaatctcagtattaaaccacattaatctgtatcccattgtctggcttttgtaaattcatccaggtcaagactaagtatgttggttaataggaatccttttttttttttaaagactaaatgtgaaaaaataatcactacttaagctaattaatattggtcattaaatttaaaggatggaaatttatcatgtttaaaaattattcaagcactcttaaaaccacttaaacagcctccagtcataaaaatgtgttctttacaaatatttgcttggcaacacgacttgaaataaataaaactttgtttcttaggagaaaa

SEQ ID NO: 599 - DNA, 481 bp, Homo sapiens
  misc_feature (1)..(481): "n" represents an unknown nucleotide
acagaatcattttctcctaagaaacaaagttttatttatttcaagtcgtgttgccaagcaaatatttgtaaagaacacatttttatgactggaggctgtttaagtggttttaagagtgcttgaataatttttaaacatgataaatttccatcctttaaatttaatgaccaatattaattagcttaagtagtgattattttttcacatttagtctttaaaaaaaaaaaaaaggattcctattaaccaacatacttagtcttgacctggatgaatttacaaaagccagacaatgggatacagattaatgtggtttaatacngagattaatcaacattgccctttttccctgccaaagggcttattttcctgacctgcttcactatggactacctaaaagtggtacaacctaaaatttttattagaaatccgccccagccttacacactcccaatccagggaagttanttaaatccncccccag

SEQ ID NO: 600 - DNA, 286 bp, Homo sapiens
  misc_feature (1)..(286): "n" represents an unknown nucleotide
gctttgtagtgaagtatagtagcaataatttctgtacctgatcaagtttattgcagcctttcttttcctatttcttttttttaagggttagtattaacaaatggcaatgagtagaaaagttaacatgaagattttagaaggagagaacttacaggacacagatttgtgattctttgactgtgacactattggatgtgattctaaaagcttttattgagcattgtcaaatttgtaagcttcatagggatggacatcatatctataatgcccttcnataatgngcgac

SEQ ID NO: 601 - DNA, 3291 bp, Homo sapiens
accgggcaagcgggaaccaggtggccacccggtgtcggtttcattttcctttggaatttctgctttacagacagaacaatggcagcccgagtacttataattggcagtggaggaagggaacatacgctggcctggaaacttgcacagtctcatcatgtcaaacaagtgttggttgccccaggaaacgcaggcactgcctgctctgaaaagatttcaaataccgccatctcaatcagtgaccacactgcccttgctcaattctgcaaagagaagaaaattgaatttgtagttgttggaccagaagcacctctggctgctgggattgttgggaacctgaggtctgcaggagtgcaatgctttggcccaacagcagaagcggctcagttagagtccagcaaaaggtttgccaaagagtttatggacagacatggaatcccaaccgcacaatggaaggctttcaccaaacctgaagaagcctgcagcttcattttgagtgcagacttccctgctttggttgtgaaggccagtggtcttgcagctggaaaaggggtgattgttgcaaagagcaaagaagaggcctgcaaagctgtacaagagatcatgcaggagaaagcctttggggcagctggagaaacaattgtcattgaagaacttcttgacggagaagaggtgtcgtgtctgtgtttcactgatggcaagactgtggcccccatgcccccagcacaggaccataagcgattactggagggagatggtggccctaacacagggggaatgggagcctattgtccagcccctcaggtttctaatgatctattactaaaaattaaagatactgttcttcagaggacagtggatggcatgcagcaagagggtactccatatacaggtattctctatgctggaataatgctgaccaagaatggcccaaaagttctagagtttaattgccgttttggtgatccagagtgccaagtaatcctcccacttcttaaaagtgatctttatgaagtgattcagtccaccttagatggactgctctgcacatctctgcctgtttggctagaaaaccacaccgccctaactgttgtcatggcaagtaaaggttatcctggagactacaccaagggtgtagagataacagggtttcctgaggctcaagctctaggactggaggtgttccatgcaggcactgccctcaaaaatggcaaagtagtaactcatgggggtagagttcttgcagtcacagccatccgggaaaatctcatatcagcccttgaggaagccaagaaaggactagctgctataaagtttgagggagcaatttataggaaagacgtcggctttcgtgccatagctttcctccagcagcccaggagtttgacttacaaggaatctggagtagatatcgcagctggaaatatgctggtcaagaaaattcagcctttagcaaaagccacttccagatcaggctgtaaagttgatcttggaggttttgctggtctttttgatttaaaagcagctggtttcaaagatccccttctggcctctggaacagatggcgttggaactaaactaaagattgcccagctatgcaataaacatgataccattggtcaagatttggtagcaatgtgtgttaatgatattctggcacaaggagcagagcccctcttcttccttgattacttttcctgtggaaaacttgacctcagtgtaactgaagctgttgttgctggaattgctaaagcttgtggaaaagctggatgtgctctccttggaggtgaaacagcagaaatgcctgacatgtatccccctggagagtatgacctagctgggtttgccgttggtgccatggagcgagatcagaaactccctcacctggaaagaatcactgagggtgatgttgttgttggaatagcttcatctggtcttcatagcaatggatttagccttgtgaggaaaatcgttgcaaaatcttccctccagtactcctctccagcacctgatggttgtggtgaccagactttaggggacttacttctcacgcctaccagaatctacagccattcactgttacctgtcctacgttcaggacatgtcaaagcctttgcccatattactggtggaggattactagagaacatccccagagtcctccctgagaaacttggggtagatttagatgcccagacctggaggatccccagggttttctcatggttgcagcaggaaggacacctctctgaggaagagatggccagaacatttaactgtggggttggcgctgtccttgtggtatcaaaggagcagacagagcagattctgagggatatccagcagcacaaggaagaagcctgggtgattggcagtgtggttgcacgagctgaaggttccccacgtgtgaaagtcaagaatctgattgaaagcatgcaaataaatgggtcagtgttgaagaatggctccctgacaaatcatttctcttttgaaaaaaaaaaggccagagtggctgtcttaatatctggaacaggatcgaacctgcaagcacttatagacagtactcgggaaccaaatagctctgcacaaattgatattgttatctccaacaaagccgcagtagctgggttagataaagcggaaagagctggtattcccactagagtaattaatcataaactgtataaaaatcgtgtagaatttgacagtgcaattgacctagtccttgaagagttctccatagacatagtctgtcttgcaggattcatgagaattctttctggcccctttgtccaaaagtggaatggaaaaatgctcaatatccacccatccttgctcccttcttttaagggttcaaatgcccatgagcaagccctggaaaccggagtcacagttactgggtgcactgtacactttgtagctgaagatgtggatgctggacagattattttgcaagaagctgttcccgtgaagaggggtgatactgtcgcaactctttctgaaagagtaaaattagcagaacataaaatatttcctgcagcccttcagctggtggccagtggaactgtacagcttggagaaaatggcaagatctgttgggttaaagaggaatgaagccttttaattcagaaatggggccagtttagaaagaattatttgctgtttgcatggtggttttttatcatggacttggcccaaaagaaaaactgctaaaagacaaaaaagacctcacccttacttcatctatttttttaataaatagagactcactaaaaaaaaaaaaaaaaaaaaaaa

SEQ ID NO: 602 - DNA, 298 bp, Homo sapiens
  misc_feature (1)..(298): "n" represents an unknown nucleotide
cttgtttttagtgagtctctatttattaaaaaaatagatgaagtaagggtgaggtcttttttgtcttttagcagtttttcttttgggccaagtccatgataaaaaaccaccatgcaaacagcaaataattctttctaaactggccccatttctgaattaaaaggcttcattcctctttaacccaacagatcttgccattttctccaagctgtacagttccactggccaccagctgaagggctgcaggnaatattttatgtnctngnnaaatttacnctntnaganagagtttcgacag

SEQ ID NO: 603 - DNA, 431 bp, Homo sapiens
  misc_feature (1)..(431): "n" represents an unknown nucleotide
gctctgcacaaattgatattgttatctccaacaaagccgcagtagctgggttagataaagcggaaagagctggtattcccactagagtaattaatcataaactgtataaaaatcgtgtagaatttgacagtgcaattgacctagtccttgaagagttctccatagacatagtctgtcttgcaggattcatgagaattctttctggccccttgtccaaaagtggaatggaaaaatgctcaatatccacccatccttgctccctgcttttaagggttcaaatgcccatgagcaagccctggaaaccggngtcanagttactgggtgcactgtacacttctgtagctgnagatgtggatgctgggcaggattatttttttcgagaagctgttccccctgaagaagggggngntaanngtcggnaaatctttctg

SEQ ID NO: 604 - DNA, 3493 bp, Homo sapiens
agcggccggggccacgatggagcgcgacggctgcgcggggggcgggagccgcggcggcgagggcgggcgcgctccccgggagggcccggcggggaacggccgcgatcggggccgcagccacgctgccgaggcgcccggggacccgcaggcggccgcgtccttgctggcccctatggacgtgggggaggagccgctggagaaggcggcgcgcgcccgcactgccaaggaccccaacacctataaagtactctcgctggtattgtcagtatgtgtgttaacaacaatacttggttgtatatttgggttgaaaccaagctgtgccaaagaagttaaaagttgcaaaggtcgctgtttcgagagaacatttgggaactgtcgctgtgatgctgcctgtgttgagcttggaaactgctgtttagattaccaggagacgtgcatagaaccagaacatatatggacttgcaacaaattcaggtgtggtgagaaaaggttgaccagaagcctctgtgcctgttcagatgactgcaaggacaagggcgactgctgcatcaactacagttctgtgtgtcaaggtgagaaaagttgggtagaagaaccatgtgagagcattaatgagccacagtgcccagcagggtttgaaacgcctcctaccctcttattttctttggatggattcagggcagaatatttacacacttggggtggacttcttcctgttattagcaaactaaaaaaatgtggaacatatactaaaaacatgagaccggtatatccaacaaaaactttccccaatcactacagcattgtcaccggattgtatccagaatctcatggcataatcgacaataaaatgtatgatcccaaaatgaatgcttccttttcacttaaaagtaaagagaaatttaatcctgagtggtacaaaggagaaccaatttgggtcacagctaagtatcaaggcctcaagtctggcacatttttctggccaggatcagatgtggaaattaacggaattttcccagacatctataaaatgtataatggttcagtaccatttgaagaaaggattttagctgttcttcagtggctacagcttcctaaagatgaaagaccacacttttacactctgtatttagaagaaccagattcttcaggtcattcatatggaccagtcagcagtgaagtcatcaaagccttgcagagggttgatggtatggttggtatgctgatggatggtctgaaagagctgaacttgcacagatgcctgaacctcatccttatttcagatcatggcatggaacaaggcagttgtaagaaatacatatatctgaataaatatttgggggatgttaaaaatattaaagttatctatggacctgcagctcgattgagaccctctgatgtcccagataaatactattcatttaactatgaaggcattgcccgaaatctttcttgccgggaaccaaaccagcacttcaaaccttacctgaaacatttcttacctaagcgtttgcactttgctaagagtgatagaattgagcccttgacattctatttggaccctcagtggcaacttgcattgaatccctcagaaaggaaatattgtggaagtggatttcatggctctgacaatgtattttcaaatatgcaagccctctttgttggctatggacctggattcaagcatggcattgaggctgacacctttgaaaacattgaagtctataacttaatgtgtgatttactgaatttgacaccggctcctaataacggaactcatggaagtcttaaccaccttctaaagaatcctgtttatacgccaaagcatcccaaagaagtgcaccccctggtacagtgccccttcacaagaaaccccagagataaccttggctgctcatgtaacccttcgattttgccgattgaggattttcaaacacagttcaatctgactgtggcagaagagaagattattaagcatgaaactttaccctatggaagacctagagttctccagaaggaaaacaccatctgtcttctttcccagcaccagtttatgagtggatacagccaagacatcttaatgcccctttggacatcctataccgtggacagaaatgacagtttctctacggaagacttctccaactgtctgtaccaggactttagaattcctcttagtcctgtccataaatgttcattttataaaaataacaccaaagtgagttacgggttcctctccccaccacaactaaataaaaattcaagtggaatatattctgaagctttgcttactacaaatatagtgccaatgtaccagagttttcaagttatatggcgctactttcatgacaccctactgcgaaagtatgctgaagaaagaaatggtgtcaatgtcgtcagtggtcctgtgtttgactttgattatgatggacgttgtgattccttagagaatctgaggcaaaaaagaagagtcatccgtaaccaagaaattttgattccaactcacttctttattgtgctaacaagctgtaaagatacatctcagacgcctttgcactgtgaaaacctagacaccttagctttcattttgcctcacaggactgataacagcgagagctgtgtgcatgggaagcatgactcctcatgggttgaagaattgttaatgttacacagagcacggatcacagatgttgagcacatcactggactcagcttctatcaacaaagaaaagagccagtttcagacattttaaagttgaaaacacatttgccaacctttagccaagaagactgatatgttttttatccccaaacaccatgaatctttttgagagaaccttatattttatatagtcctctagctacactattgcattgttcagaaactgtcgaccagagttagaacggagccctcggtgatgcggacatctcagggaaacttgcgtactcagcacagcagtggagagtgttcctgttgaatcttgcacatatttgaatgtgtaagcattgtatacattgatcaagttcgggggaataaagacagaccacacctaaaactgcctttctgcttctcttaaaggagaagtagctgtgaacattgtctggataccagatatttgaatctttcttactattggtaataaaccttgatggcattgggcaaacagtagacttatagtagggttggggtagcccatgttatgtgactatctttatgagaattttaaagtggttctggatatcttttaacttggagtttcatttcttttcattgtaatcaaaaaaaaaattaacagaagccaaaatacttctgagaccttgtttcaatctttgctgtatatcccctcaaaatccaagttattaatcttatgtgttttctttttaattttttgattggatttctttagatttaatggttcaaatgagttcaactttgagggacgatctttgaatatacttacctattataaaatcttactttgtatttgtattt

SEQ ID NO: 605 - DNA, 414 bp, Homo sapiens
aatacaaatacaaagtaagattttataataggtaagtatattcaaagatcgtccctcaaagttgaactcatttgaaccattaaatctaaagaaatccaatcaaaaaattaaaaagaaaacacataagattaataatttggatttagaggggatatacagcaaagattgaaacaaggtctcagaagtattttggcttctgttaatttttttttttgattacaatgaaaagaaatgaaactccatgttaaaagatatccagaaccactttaaaattctcataaagatagtcacataacatgggctaccccaatcctactataagtctactgtttgcccaatgccatcaaggtttattaccaatagtaagaaagattcaaatatctggtatccagacaatgttcacagctacttctc

SEQ ID NO: 606 - DNA, 429 bp, Homo sapiens
cagaccacacctaaaactgcctttctgcttctcttaagggagaagtagctgtgaacattgtctggataccagatatttgaatctttcttactattggtaataaaccttgatggcattgggcaaacagtagacttatagtaggattggggtagcccatgttatgtgactatctttatgagaattttaaagtggttctggatatcttttaacatggagtttcatttcttttcattgtaatcaaaaaaaaaaattaagcagagccaaaatacttcttagaccttgtttcaatctttgctgtatatcccctcaaaatcccaattattaatcctatgtgttttcgttttaaattttttgattgggagtttctttagattttaatggttccaaaggagttcaacttttgaggggacgatccttgaaatataccta

SEQ ID NO: 607 - DNA, 2698 bp, Homo sapiens
caagatgcatccaggggtcctggctgccttcctcttcttgagctggactcattgtcgggccctgccccttcccagtggtggtgatgaagatgatttgtctgaggaagacctccagtttgcagagcgctacctgagatcatactaccatcctacaaatctcgcgggaatcctgaaggagaatgcagcaagctccatgactgagaggctccgagaaatgcagtctttcttcggcttagaggtgactggcaaacttgacgataacaccttagatgtcatgaaaaagccaagatgcggggttcctgatgtgggtgaatacaatgttttccctcgaactcttaaatggtccaaaatgaatttaacctacagaattgtgaattacacccctgatatgactcattctgaagtcgaaaaggcattcaaaaaagccttcaaagtttggtccgatgtaactcctctgaattttaccagacttcacgatggcattgctgacatcatgatctcttttggaattaaggagcatggcgacttctacccatttgatgggccctctggcctgctggctcatgcttttcctcctgggccaaattatggaggagatgcccattttgatgatgatgaaacctggacaagtagttccaaaggctacaacttgtttcttgttgctgcgcatgagttcggccactccttaggtcttgaccactccaaggaccctggagcactcatgtttcctatctacacctacaccggcaaaagccactttatgcttcctgatgacgatgtacaagggatccagtctctctatggtccaggagatgaagaccccaaccctaaacatccaaaaacgccagacaaatgtgacccttccttatcccttgatgccattaccagtctccgaggagaaacaatgatctttaaagacagattcttctggcgcctgcatcctcagcaggttgatgcggagctgtttttaacgaaatcattttggccagaacttcccaaccgtattgatgctgcatatgagcacccttctcatgacctcatcttcatcttcagaggtagaaaattttgggctcttaatggttatgacattctggaaggttatcccaaaaaaatatctgaactgggtcttccaaaagaagttaagaagataagtgcagctgttcactttgaggatacaggcaagactctcctgttctcaggaaaccaggtctggagatatgatgatactaaccatattatggataaagactatccgagactaatagaagaagacttcccaggaattggtgataaagtagatgctgtctatgagaaaaatggttatatctattttttcaacggacccatacagtttgaatacagcatctggagtaaccgtattgttcgcgtcatgccagcaaattccattttgtggtgttaagtgtctttttaaaaattgttatttaaatcctgaagagcatttggggtaatacttccagaagtgcggggtaggggaagaagagctatcaggagaaagcttggttctgtgaacaagcttcagtaagttatctttgaatatgtagtatctatatgactatgcgtggctggaaccacattgaagaatgttagagtaatgaaatggaggatctctaaagagcatctgattcttgttgctgtacaaaagcaatggttgatgatacttcccacaccacaaatgggacacatggtctgtcaatgagagcataatttaaaaatatatttataaggaaattttacaagggcataaagtaaatacatgcatataatgaataaatcattcttactaaaaagtataaaatagtatgaaaatggaaatttgggagagccatacataaaagaaataaaccaaaggaaaatgtctgtaataatagactgtaacttccaaataaataattttcattttgcactgaggatattcagatgtatgtgcccttcttcacacagacactaacgaaatatcaaagtcattaaagacaggagacaaaagagcagtggtaagaatagtagatgtggcctttgaattctgtttaattttcacttttggcaatgactcaaagtctgctctcatataagacaaatattcctttgcatattataaaggataaagaaggatgatgtctttttattaaaatatttcaggttcttcagaagtcacacattacaaagttaaaattgttatcaaaatagtctaaggccatggcatccctttttcataaattatttgattatttaagactaaaagttgcattttaaccctattttacctagctaattatttaattgtccggtttgtcttggatatataggctattttctaaagacttgtatagcatgaaataaaatatatcttataaagtggaagtatgtatattaaaaaagagacatccaaatttttttttaaagcagtctactagattgtgatcccttgagatatggaaggatgcctttttttctctgcatttaaaaaaatcccccagcacttcccacagtgcctattgatacttggggagggtgcttggcacttattgaatatatgatcggccatcaagggaagaactattgtgctcagagacactgttgataaaaactcaggcaaagaaaatgaaatgcatatttgcaaagtgtattaggaagtgtttatgttgtttataataaaaatatattttcaacagaaaaaaaa

SEQ ID NO: 608 - DNA, 410 bp, Homo sapiens
gtctgttgaaaatatatttttattataaacaacataaacacttcctaatacactttgcaaatatgcatttcattttctttgcctgagtttttatcaacagtgtctctgagcacaatagttcttcccttgatggccgatcatatattcaataagtgccaagcaccctccccaagtatcaataggcactgtgggaagtgctgggggatttttttaaatgcagagaaaaaaaggcatccttccatatctcaagggatcacaatctagtagactgctttaaaaaaaaaaatttggatgtctcttttttaatatacatacttccactttataagatatattttatttcatgctatacaagtctttagaaaatagcctatatatccaagacaaactggacaattaaataattagct

SEQ ID NO: 609 - DNA, 396 bp, Homo sapiens
taaaaattgttatttaaatcctgaagagcatttggggtaatacttccagaagtgcggggtaggggaagaagagctatcaggagaaagcttggttctgtgaacaagcttcagtaagttatctttgaatatgtagtatctatatgactatgcgtggctggaaccacattgaagaatgttagagtaatgaaatggaggatctctaaagagcatctgattcttgttgctgtacaaaagcaatggttgatgatacttcccacaccacaaatgggacacatggtctgtcaatgagagcataatttaaaaatatatttataaggaaattttacaagggcataaagtaaatacatgcatataatgaataaatcattcttactaaaaagtataaaatagtatgaa

SEQ ID NO: 610 - DNA, 1789 bp, Homo sapiens
gaattcatctgtcgactgctaccacgggagttccccggagaaggatcctgcagcccgagtcccgaggataaagcttggggttcatcctccttccctggatcactccacagtcctcaggcttccccaatccaggggactcggcgccgggacgctgctatggacgacattttcactcagtgccgggagggcaacgcagtcgccgttcgcctgtggctggacaacacggagaacgacctcaaccagggggacgatcatggcttctcccccttgcactgggcctgccgagagggccgctctgctgtggttgagatgttgatcatgcggggggcacggatcaatgtaatgaaccgtggggatgacacccccctgcatctggcagccagtcatggacaccgtgatattgtacagaagctattgcagtacaaggcagacatcaatgcagtgaatgaacacgggaatgtgcccctgcactatgcctgtttttggggccaagatcaagtggcagaggacctggtggcaaatggggcccttgtcagcatctgtaacaagtatggagagatgcctgtggacaaagccaaggcacccctgagagagcttctccgagagcgggcagagaagatgggccagaatctcaaccgtattccatacaaggacacattctggaaggggaccacccgcactcggccccgaaatggaaccctgaacaaacactctggcattgacttcaaacagcttaacttcctgacgaagctcaacgagaatcactctggagagctatggaagggccgctggcagggcaatgacattgtcgtgaaggtgctgaaggttcgagactggagtacaaggaagagcagggacttcaatgaagagtgtccccggctcaggattttctcgcatccaaatgtgctcccagtgctaggtgcctgccagtctccacctgctcctcatcctactctcatcacacactggatgccgtatggatccctctacaatgtactacatgaaggcaccaatttcgtcgtggaccagagccaggctgtgaagtttgctttggacatggcaaggggcatggccttcctacacacactagagcccctcatcccacgacatgcactcaatagccgtagtgtaatgattgatgaggacatgactgcccgaattagcatggctgatgtcaagttctctttccaatgtcctggtcgcatgtatgcacctgcctgggtagcccccgaagctctgcagaagaagcctgaagacacaaacagacgctcagcagacatgtggagttttgcagtgcttctgtgggaactggtgacacgggaggtaccctttgctgacctctccaatatggagattggaatgaaggtggcattggaaggccttcggcctaccatcccaccaggtatttcccctcatgtgtgtaagctcatgaagatctgcatgaatgaagaccctgcaaagcgacccaaatttgacatgattgtgcctatccttgagaagatgcaggacaagtaggactggaaggtccttgcctgaactccagaggtgtcgggacatggttgggggaatgcacctccccaaagcagcaggcctctggttgcctcccccgcctccagtcatggtactaccccagcctggggtccatccccttcccccatccctaccactgtgcgcaagaggggcgggctcagagctttgtcacttgccacatggtgtcttccaacatgggagggatcagccccgcctgtcacaataaagtttattatgaaaaaaaaaaaaaaaaaaaaaa

SEQ ID NO: 611 - DNA, 439 bp, Homo sapiens
  misc_feature (1)..(439): "n" represents an unknown nucleotide
ttttctgttttcataataaactttattgtgacaggcggggctcgatccctcccatgttgggagacaccatgtggcaagtgacaaagctctgagcccgcccctcttgggcnacagtggtagggatgggggaaggggatggaccccatggctcggggtagtaccatgactggnggcgggggaggcaaccagaggcctgctgctttggggaggtgcattcccccaaccatgtcccgacacctctggagttcaggcaaggaccttccagtcctacttgtcctgcatcttctcaaggataggcacaatcatgtcaaatttggggtccgctttgcagggtcttcattcatgcagatcttcatgagcttacacacatgaggggaaatacctggttgggatggtaggccgacnttccaaatggccaccttcattccaatctccatat

SEQ ID NO: 612 - DNA, 464 bp, Homo sapiens
  misc_feature (1)..(464): "n" represents an unknown nucleotide
tccaatgtcctggtcgcatgtatgcacctgcctgggtagcccccgaagctctgcagaagaagcctgaagacacaaacagacgctcagcagacatgtggagttttgcagtgcttctgtgggaactggtgacacgggaggtaccctttgctgacctctccaatatggagattggaatgaaggtggcattggaaggccttcgctanccatcccaccaggtatttcccctcatgtgtgtaagctcatgaagatctgcatgaatgaagaccctgcaaagcgacccaaattttgacatgattgtgnctatccttgagaagatgcaggacnagtaggacttggaaggtcttggcctgaacttcagaggtgtccggacaatgggttgggggaatggancttccccnaaagagcagggctctggggtttgcctcccccggnttcaagttaatggnactaacccagncatgggg

SEQ ID NO: 613 - DNA, 696 bp, Homo sapiens
ttccccccccccccccccccccccgcccgagcacaggacacagctgggttctgaagcttctgagttctgcagcctcacctctgagaaaacctcttttccaccaataccatgaagctctgcgtgactgtcctgtctctcctcatgctagtagctgccttctgctctccagcgctctcagcaccaatgggctcagaccctcccaccgcctgctgcttttcttacaccgcgaggaagcttcctcgcaactttgtggtagattactatgagaccagcagcctctgctcccagccagctgtggtattccaaaccaaaagaagcaagcaagtctgtgctgatcccagtgaatcctgggtccaggagtacgtgtatgacctggaactgaactgagctgctcagagacaggaagtcttcagggaaggtcacctgagcccggatgcttctccatgagacacatctcctccatactcaggactcctctccgcagttcctgtcccttctcttaatttaatcttttttatgtgccgtgttattgtattaggtgtcatttccattatttatattagtttagccaaaggataagtgtcctatggggatggtccactgtcactgtttctctgctgttgcaaatacatggataacacatttgattctgtgtgttttccataataaaactttaaaataaaatgcagacagtta

SEQ ID NO: 614 - DNA, 449 bp, Homo sapiens
  misc_feature (1)..(449): "n" represents an unknown nucleotide
gttcnnttttccttnctcatttnattttaaagttttattatgaaaacacatggaattaacggtgttatccatgtatttgcaacagcagagaaagagtgagagtggaccatccccataggancnacttatcctttggctaaactaatataaataatggaaataacacctaatacaataatacagcacataaaagagattacattaagagaagagacaggaactgcggagaggagtcctgagtatggaggagatgcggctcatggagaagcatccaggctcaggtgaccttccctgaagacttcctgtctctgagcagctcagttcagttccagggtcatacacgtactccgggacccgggnctcactggggggtcagcgcagacttgcttgcctcttttgggtttgggaataccacagctgggctnggggagcagaggntgctgggtttc

SEQ ID NO: 615 - DNA, 372 bp, Homo sapiens
  misc_feature (1)..(372): "n" represents an unknown nucleotide
ctgagaggaactcctcactcagctagcttcaggagccatgacatcatctctaccatggaaattccactcactctcctgtgcccccacatttgtcctaggcctcagagtccctataaagagagattcccaactcagtatcagcacaggacacagctaggttctgaagcttctgagttctgcagcctcacctctgagaaaacctctttgccaccaataccatgaagctctgcgtgactgtcctgtctctcctcgtgctagtagctgccttctgctctctagcactctcagcaccaatgggctcagaccctcccaccgcctgctgcttttcttacaccgtgaggaagcttcctcgcaactttgtggtagattant

SEQ ID NO: 616 - DNA, 5830 bp, Homo sapiens
actgagtcccgggaccccgggagagcggtcagtgtgtggtcgctgcgtttcctctgcctgcgccgggcatcacttgcgcgccgcagaaagtccgtctggcagcctggatatcctctcctaccggcacccgcagacgcccctgcagccgccggtcggcgcccgggctccctagccctgtgcgctcaactgtcctgcgctgcggggtgccgcgagttccacctccgcgcctccttctctagacaggcgctgggagaaagaaccggctcccgagttctgggcatttcgcccggctcgaggtgcaggatgcagagcaaggtgctgctggccgtcgccctgtggctctgcgtggagacccgggccgcctctgtgggtttgcctagtgtttctcttgatctgcccaggctcagcatacaaaaagacatacttacaattaaggctaatacaactcttcaaattacttgcaggggacagagggacttggactggctttggcccaataatcagagtggcagtgagcaaagggtggaggtgactgagtgcagcgatggcctcttctgtaagacactcacaattccaaaagtgatcggaaatgacactggagcctacaagtgcttctaccgggaaactgacttggcctcggtcatttatgtctatgttcaagattacagatctccatttattgcttctgttagtgaccaacatggagtcgtgtacattactgagaacaaaaacaaaactgtggtgattccatgtctcgggtccatttcaaatctcaacgtgtcactttgtgcaagatacccagaaaagagatttgttcctgatggtaacagaatttcctgggacagcaagaagggctttactattcccagctacatgatcagctatgctggcatggtcttctgtgaagcaaaaattaatgatgaaagttaccagtctattatgtacatagttgtcgttgtagggtataggatttatgatgtggttctgagtccgtctcatggaattgaactatctgttggagaaaagcttgtcttaaattgtacagcaagaactgaactaaatgtggggattgacttcaactgggaatacccttcttcgaagcatcagcataagaaacttgtaaaccgagacctaaaaacccagtctgggagtgagatgaagaaatttttgagcaccttaactatagatggtgtaacccggagtgaccaaggattgtacacctgtgcagcatccagtgggctgatgaccaagaagaacagcacatttgtcagggtccatgaaaaaccttttgttgcttttggaagtggcatggaatctctggtggaagccacggtgggggagcgtgtcagaatccctgcgaagtaccttggttacccacccccagaaataaaatggtataaaaatggaataccccttgagtccaatcacacaattaaagcggggcatgtactgacgattatggaagtgagtgaaagagacacaggaaattacactgtcatccttaccaatcccatttcaaaggagaagcagagccatgtggtctctctggttgtgtatgtcccaccccagattggtgagaaatctctaatctctcctgtggattcctaccagtacggcaccactcaaacgctgacatgtacggtctatgccattcctcccccgcatcacatccactggtattggcagttggaggaagagtgcgccaacgagcccagccaagctgtctcagtgacaaacccatacccttgtgaagaatggagaagtgtggaggacttccagggaggaaataaaattgaagttaataaaaatcaatttgctctaattgaaggaaaaaacaaaactgtaagtacccttgttatccaagcggcaaatgtgtcagctttgtacaaatgtgaagcggtcaacaaagtcgggagaggagagagggtgatctccttccacgtgaccaggggtcctgaaattactttgcaacctgacatgcagcccactgagcaggagagcgtgtctttgtggtgcactgcagacagatctacgtttgagaacctcacatggtacaagcttggcccacagcctctgccaatccatgtgggagagttgcccacacctgtttgcaagaacttggatactctttggaaattgaatgccaccatgttctctaatagcacaaatgacattttgatcatggagcttaagaatgcatccttgcaggaccaaggagactatgtctgccttgctcaagacaggaagaccaagaaaagacattgcgtggtcaggcagctcacagtcctagagcgtgtggcacccacgatcacaggaaacctggagaatcagacgacaagtattggggaaagcatcgaagtctcatgcacggcatctgggaatccccctccacagatcatgtggtttaaagataatgagacccttgtagaagactcaggcattgtattgaaggatgggaaccggaacctcactatccgcagagtgaggaaggaggacgaaggcctctacacctgccaggcatgcagtgttcttggctgtgcaaaagtggaggcatttttcataatagaaggtgcccaggaaaagacgaacttggaaatcattattctagtaggcacggcggtgattgccatgttcttctggctacttcttgtcatcatcctacggaccgttaagcgggccaatggaggggaactgaagacaggctacttgtccatcgtcatggatccagatgaactcccattggatgaacattgtgaacgactgccttatgatgccagcaaatgggaattccccagagaccggctgaagctaggtaagcctcttggccgtggtgcctttggccaagtgattgaagcagatgcctttggaattgacaagacagcaacttgcaggacagtagcagtcaaaatgttgaaagaaggagcaacacacagtgagcatcgagctctcatgtctgaactcaagatcctcattcatattggtcaccatctcaatgtggtcaaccttctaggtgcctgtaccaagccaggagggccactcatggtgattgtggaattctgcaaatttggaaacctgtccacttacctgaggagcaagagaaatgaatttgtcccctacaagaccaaaggggcacgattccgtcaagggaaagactacgttggagcaatccctgtggatctgaaacggcgcttggacagcatcaccagtagccagagctcagccagctctggatttgtggaggagaagtccctcagtgatgtagaagaagaggaagctcctgaagatctgtataaggacttcctgaccttggagcatctcatctgttacagcttccaagtggctaagggcatggagttcttggcatcgcgaaagtgtatccacagggacctggcggcacgaaatatcctcttatcggagaagaacgtggttaaaatctgtgactttggcttggcccgggatatttataaagatccagattatgtcagaaaaggagatgctcgcctccctttgaaatggatggccccagaaacaatttttgacagagtgtacacaatccagagtgacgtctggtcttttggtgttttgctgtgggaaatattttccttaggtgcttctccatatcctggggtaaagattgatgaagaattttgtaggcgattgaaagaaggaactagaatgagggcccctgattatactacaccagaaatgtaccagaccatgctggactgctggcacggggagcccagtcagagacccacgttttcagagttggtggaacatttgggaaatctcttgcaagctaatgctcagcaggatggcaaagactacattgttcttccgatatcagagactttgagcatggaagaggattctggactctctctgcctacctcacctgtttcctgtatggaggaggaggaagtatgtgaccccaaattccattatgacaacacagcaggaatcagtcagtatctgcagaacagtaagcgaaagagccggcctgtgagtgtaaaaacatttgaagatatcccgttagaagaaccagaagtaaaagtaatcccagatgacaaccagacggacagtggtatggttcttgcctcagaagagctgaaaactttggaagacagaaccaaattatctccatcttttggtggaatggtgcccagcaaaagcagggagtctgtggcatctgaaggctcaaaccagacaagcggctaccagtccggatatcactccgatgacacagacaccaccgtgtactccagtgaggaagcagaacttttaaagctgatagagattggagtgcaaaccggtagcacagcccagattctccagcctgactcggggaccacactgagctctcctcctgtttaaaaggaagcatccacaccccaactcccggacatcacatgagaggtctgctcagattttgaagtgttgttctttccaccagcaggaagtagccgcatttgattttcatttcgacaacagaaaaaggacctcggactgcagggagccagtcttctaggcatatcctggaagaggcttgtgacccaagaatgtgtctgtgtcttctcccagtgttgacctgatcctcttttttcattcatttaaaaagcattatcatgcccctgctgcgggtctcaccatgggtttagaacaaagagcttcaagcaatggccccatcctcaaagaagtagcagtacctggggagctgacacttctgtaaaactagaagataaaccaggcaacgtaagtgttcgaggtgttgaagatgggaaggatttgcagggctgagtctatccaagaggctttgtttaggacgtgggtcccaagccaagccttaagtgtggaattcggattgatagaaaggaagactaacgttaccttgctttggagagtactggagcctgcaaatgcattgtgtttgctctggtggaggtgggcatggggtctgttctgaaatgtaaagggttcagacggggtttctggttttagaaggttgcgtgttcttcgagttgggctaaagtagagttcgttgtgctgtttctgactcctaatgagagttccttccagaccgttagctgtctccttgccaagccccaggaagaaaatgatgcagctctggctccttgtctcccaggctgatcctttattcagaataccacaaagaaaggacattcagctcaaggctccctgccgtgttgaagagttctgactgcacaaaccagcttctggtttcttctggaatgaataccctcatatctgtcctgatgtgatatgtctgagactgaatgcgggaggttcaatgtgaagctgtgtgtggtgtcaaagtttcaggaaggattttacccttttgttcttccccctgtccccaacccactctcaccccgcaacccatcagtattttagttatttggcctctactccagtaaacctgattgggtttgttcactctctgaatgattattagccagacttcaaaattattttatagcccaaattataacatctattgtattatttagacttttaacatatagagctatttctactgatttttgcccttgttctgtcctttttttcaaaaaagaaaatgtgttttttgtttggtaccatagtgtgaaatgctgggaacaatgactataagacatgctatggcacatatatttatagtctgtttatgtagaaacaaatgtaatatattaaagccttatatataatgaactttgtactattcacattttgtatcagtattatgtagcataacaaaggtcataatgctttcagcaattgatgtcattttattaaagaacattgaaaaacttga

SEQ ID NO: 617 - DNA, 436 bp, Homo sapiens
  misc_feature (1)..(436): "n" represents an unknown nucleotide
cangtttntcaatgttctttaatanaatgacatcaattgctgaaanattattgacctttgttatgctacataatactgatacaaaatgtgaatagtacaaagttcattatatataaggctttaatatattacatttgtttctacataaacagactataaatatatngtgccatagcatgtcttatagtcattgttcccagcatttcacactatggtaccaaacaaaaaacacattttcttttttgaaaaaaaggacagaacaagggcaaaaatcagtagaaatagctctatatgttaaaagtctaaataatacaatagatggttataatttgggctataaaataattttgaagtctggctaataatcattcagagagtgaacaaacccaatcagggtttactggagtagaggccaaataactaaaatactgatggg

SEQ ID NO: 618 - DNA, 264 bp, Homo sapiens
  misc_feature (1)..(264): "n" represents an unknown nucleotide
tctaggcatatcctggaagaggcttgtgacccaagaatgtgtctgtgtcttctcccagtgttgacctgatcctctttttcattcatttaaaaagcatttatcatgccccctgctgcgggtctcaccatgggtttagaacaaagacgttcaagaaatggccccatcctcaaagaagtagcagtacctnggggagctgacacttctgtaaaactagaagataaaccaggcaatgtaaagtgttcgaggtgttgaagatggggaagg

SEQ ID NO: 619 - DNA, 3522 bp, Homo sapiens
gccatttgaagcagaatccaaaccatgaattgtagagaattacccttgaccctttgggtgcttatatctgtaagcactgcagaatcttgtacttcacgtccccacattactgtggttgaaggggaacctttctatctgaaacattgctcgtgttcacttgcacatgagattgaaacaaccaccaaaagctggtacaaaagcagtggatcacaggaacatgtggagctgaacccaaggagttcctcgagaattgctttgcatgattgtgttttggagttttggccagttgagttgaatgacacaggatcttactttttccaaatgaaaaattatactcagaaatggaaattaaatgtcatcagaagaaataaacacagctgtttcactgaaagacaagtaactagtaaaattgtggaagttaaaaaattttttcagataacctgtgaaaacagttactatcaaacactggtcaacagcacatcattgtataagaactgtaaaaagctactactggagaacaataaaaacccaacgataaagaagaacgccgagtttgaagatcaggggtattactcctgcgtgcatttccttcatcataatggaaaactatttaatatcaccaaaaccttcaatataacaatagtggaagatcgcagtaatatagttccggttcttcttggaccaaagcttaaccatgttgcagtggaattaggaaaaaacgtaaggctcaactgctctgctttgctgaatgaagaggatgtaatttattggatgttcggggaagaaaatggatcggatcctaatatacatgaagagaaagaaatgagaattatgactccagaaggcaaatggcatgcttcaaaagtattgagaattgaaaatattggtgaaagcaatctaaatgttttatataattgcactgtggccagcacgggaggcacagacaccaaaagcttcatcttggtgagaaaagcagacatggctgatatcccaggccacgtcttcacaagaggaatgatcatagctgttttgatcttggtggcagtagtgtgcctagtgactgtgtgtgtcatttatagagttgacttggttctattttatagacatttaacgagaagagatgaaacattaacagatggaaaaacatatgatgcttttgtgtcttacctaaaagaatgccgacctgaaaatggagaggagcacacctttgctgtggagattttgcccagggtgttggagaaacattttgggtataagttatgcatatttgaaagggatgtagtgcctggaggagctgttgttgatgaaatccactcactgatagagaaaagccgaagactaatcattgtcctaagtaaaagttatatgtctaatgaggtcaggtatgaacttgaaagtggactccatgaagcattggtggaaagaaaaattaaaataatcttaattgaatttacacctgttactgacttcacattcttgccccaatcactaaagcttttgaaatctcacagagttctgaagtggaaggccgataaatctctttcttataactcaaggttctggaagaaccttctttacttaatgcctgcaaaaacagtcaagccaggtagagacgaaccggaagtcttgcctgttctttccgagtcttaatcttcagaaacagtgaacgccaaaaagaactcaagatattctggggactgagcatatgaacctgttcataacaaaggctgtgactcgaaataattaactttgtcaaaatcctgctcacaatttgaagatgaaacttgtcattaggttggcgggaatgagactaaagattgcgctgtgggctgtggtcacgtgctcccagaagacctggaattcaaaagaaatggagctattctttttctccctctttcataactggatgcagctgctcatactcaatcccatattcagcaagtgtgaagctggacgtgatgcaaaataaccgatgccctacaaaaagggcgcatctttaagagttttaatgccagtgcttaattcgaatgaggggattttaagtgtctgaagaggcattttctagggaccagtgggtgactgagtaactgaaatgctgctttcactccctaacaccatggatctggttgtgcataggatgtgggaggaggggctggcagggccgccttcagaggctgcagggcctcagcctcaggatgcatttaatgtatcctggccacagttgcagccaacggttcttgaaagctcggtaaggccctgcaacgcagagcctgcttatgtggatctatttatgggaacttcttaaaaggaccccagaatagctctttatctttcacaagagacacaaattctaattgagttaattatctgggcctttcactttggatgctctgaaacatttgttgattttgtgtgaatgtttatatcaaaatgtttgccaggttgtattagccattgaatagcaaaaaactgatagttacttgcttgttttttaaaaattacatattaaaaatgcccttggcataaggcagcatggtgtggcagttaagagatgggctgtgcagcccatcctgagctccagtcctgagtttgctacttacttctgtggcctctggaaccttatccaacctcttggtgcttcagtttcctcatctgtgaaattagaatttataataattgcacctacctcccaggggtaactaaatgaataaatataataaagtacttacagtggttcctgacacagactcagcactccgtcagtgttgccatgactatttttattatcattattaatgattacttagatcaattatttagcagtggactaatggaagctacagagcagggaagggaagcagatctagggaggaaggcagttttgatttgaggaggtttgcacatgtagagaagcatactggagaagcatatccagagggcgaaagatatctctccattgtgcatctgcctcttttgacgttggaagacacatgtcttactccccaaagggagcccagcactgggagccttcttgatgatctcaaaaataatagctattcaagaaaatcaccaagtgactgtgaaaccgtcagttcggaaggctggttagaacatgtgggagcaacatgaatgttctacaaaagtttaaagcagagattgtttcaaatgggtgtagtagatattactgaaaaccaaaaaagagtgagattgtcagtgtaagaatgtgatttaatgtttgtagtgcttacaattttgtgtaccaactggatgactaaaaagagtaaaataacttaattaatagctcatattttatgtgtgaaaacatgttagtgaacatatataatcaaaatagatttcattgctattgcatagtctctaatacatagaatgattttgcttttctcttttattatacttgctttaaaatacttgaaatatattttgcattaaatgcatttcaagttaaatgtcttaaatgtatacattagatgtgtgttttaaaatgcataaaacacgttgaaa

SEQ ID NO: 620 - DNA, 594 bp, Homo sapiens
tcattatggtttttcaacgtgttttatgcattttaaaacacacatctaatgtatacatttaagacatttaacttgaaatgcatttaatgcaaaatatatttcaagtattttaaagcaagtataataaaagagaaaagcaaaatcattctatgtattagagactatgcaatagcaatgaaatctattttgattatatatgttcactaacatgttttcacacataaaatatgagctattaattaaattattttactctttttagtcatccagttggtacacaaaattgtaagcactacaaacattaaatcacattcttacactgacaatctcactcttttttggttttcagtaatatctactacacccatttgaaacaatctctgctttaaacttttgtagaacattcatgttgctcccacatgttctaaccagccttccgaactgacggtttcacagtcacttggtgattttcttgaatagctattatttttgagatcatcaagaaggctcccagtgctgggctccctttggggagtaagacatgtgtcttccaacgtcaaaagaggcagatgcacaatggagagatatctttcg

SEQ ID NO: 621 - DNA, 530 bp, Homo sapiens
  misc_feature (1)..(530): "n" represents an unknown nucleotide
gccattgattagtaaaaaactgatagttacttgcttgttttttaaaaattacatattaaaaatgcccttggcataaggcagcatggtgtggcagttaagagatgggctgtgcagcccatcctgagctccagtcctgagtttgctacttacttctggggcctctggaaccttatccaacctcttggtgcttcagtttcctcatctgtgaaattagaatttataataattgcacctacctcccaggggtaactaaatgaataaatataataaagtacttacagtggttcctgacacagactcagcactccgtcagtgttgccatgactatttttattatcattattaatgattacttagatcaattatttagcagtggactaatggaagctacagagcagggaagggaagcagatctagggaggaaggcagttttgatttgaggaggtttgcacatgtagagaagcatactggagaagcatatccagagggcgaaagatatctctccattgtgcatctgcctctnttgacgt

SEQ ID NO: 622 - DNA, 3120 bp, Homo sapiens
ccgcagagggccggggctacggggcagccccgggcgatgaggggccggcgttgaccgggaagagcgggcaccgcggcagtggctccgaggggacccgcgatggcagcgccctgagaggaggctccaggcagggcgggctgcgctggcagcggccgctgaggtgctggccggccggctggctggcgacgggggcagaagcgacgagaggcgcgctcggcacccgcacccccgtgcccccgcctcagttgtctaaacttcgggctctcttccaccgtctgcgcgcccagagtcaacaacttcttcacccccctccgcccccgcccttccctccgtcagccccgggagctcgccgcggcccggggaccaggaacctccagcgctgagatgtggccgtgaggcgttggcgggcgccgaggagaagctcggcggcgtcccggggccggagggccgtggggccggggcgcaggggcgcgagcaccccgcgcctctcccccgcctcctcctgccgtctccgccgctgcccgtgccttgcaagcagcagccggagctgccaagcgtcagggccgcggagatgtcgtcgtcgtcgccgccggcgggggctgccagcgccgccatctcggcctcggagaaagtggacggcttcacccggaaatcggtccgcaaggcgcagaggcagaagcgctcccagggctcgtcgcagtttcgcagccagggcagccaggcagagctgcacccgctgccccagctcaaagatgccacttcaaatgaacaacaagagcttttctgtcagaagttgcagcagtgttgtatactgtttgatttcatggactctgtttcagacttgaagagcaaagaaattaaaagagcaacactgaatgaactggttgagtatgtttcaactaatcgtggtgtaattgttgaatcagcgtattctgatatagtaaaaatgatcagtgctaacatcttccgtacacttcctccaagtgataatccagattttgatccagaagaggatgaacccacgcttgaggcctcttggcctcacatacagttggtatatgaattcttcttgagatttttggagagccctgatttccagcctagcattgcaaaacgatacattgatcagaaattcgtacaacagctcctggagctttttgatagtgaagatcccagagaacgtgacttcctgaagactgttctgcaccgaatttatgggaaatttcttggattaagagcattcatcagaaaacaaattaacaacattttcctcaggtttatatatgaaacagaacatttcaatggtgttgctgaacttcttgaaatattaggaagtattatcaatggctttgcattgccactgaaagcagaacataaacaatttctaatgaaggttcttattcctatgcatactgcaaaaggattagctttgtttcatgctcagctagcatattgtgttgtacagttcctggagaaagatacaacactaacagagccagtgatcagaggactgctgaaattttggccaaaaacctgcagtcagaaagaggtgatgtttttaggagaaattgaagaaatcttagatgtcattgaaccaacacagttcaaaaaaattgaagagccacttttcaagcagatatccaagtgtgtatccagttctcattttcaggttgcagaaagggcattgtacttctggaataacgaatatattcttagtttgattgaggagaacattgataaaattctgccaattatgtttgccagtttgtacaaaatttccaaagaacactggaatccgaccattgtagcactggtatacaatgtgctgaaaaccctaatggaaatgaatggcaagcttttcgatgaccttactagctcatacaaagctgaaagacagagagagaaaaagaaggaattggaacgtgaagaattatggaaaaaattagaggagctaaagctaaagaaagctctagaaaaacagaatagtgcttacaacatgcacagtattctcagcaatacaagtgccgaataaaaaaaaagcctcccacctctgccggataggcagagttttgtatgcttttttgaaatatgtaaaaattacaaaacaaacctcatcagtataatataattaaaaggccaattttttctggcaactgtaaatggaaaaatatatggactaaacgtagccctgtgctgtatcatggccatagtatattgtaacctttgtctaatcattggatttattgtgtcacttctgaagtttcacagaaatgaatgaattttatcatctatgatatgagtgagataattatgggagtggtaagaattatgacttgaattcttctttgattgtgttgcacatagatatggtagtctgctctgtatatttttcccttttataatgtgcttttcacactgctgcaaaccttagttacatcctaggaaaaaatacttcctaaaataaaactaaggtatcatccttacccttctctttgtctcacccagaaatatgatggggggaattacctgccctaacccctccctcaataaatacattactgtactctggaatttaggcaaaaccttaaatctccaggctttttaaagcacaaaatataaataaaagctgggaaagtaaaccaaaattcttcagattgttcctcatgaatatcccccttcctctgcaattctccagagtggtaacagatgggtagaggcagctcaggtgaattacccagcttgcctctcaattcattcctcctcttcctctcaaaggctgaaggcagggcctttccagtcctcacaacctgtccttcacctagtccctcctgacccagggatggaggctttgagtcccacagtgtggtgatacagagcactagttgtcactgcctggctttatttaaaggaactgcagtaggcttcctctgtagagctctgaaaaggttgactatatagaggtcttgtatgtttttacttggtcaagtatttctcacatcttttgttatcagagtaccattccaatctcttaacttgcagttgtgtggaaaactgttttgtaatgaaagatcttcattgggggattgagcagcatttaataaagtctatgtttgtattttg

SEQ ID NO: 623 - DNA, 525 bp, Homo sapiens
  misc_feature (1)..(525): "n" represents an unknown nucleotide
tttttttttaaggcaaaatacaaacatagactttattaaatgctgctcaatcccccaatgaagatctttcattacaaaacagttttccacacaactgcaagttaagagattggaatggtactctgataacaaaagatgtgagaaatacttgaccaagtaaaaacatacaagacctctatatagtcaaccttttcagagctctacagaggaagcctactgcagttcctttaaataaagccagggcagtgacaactagtgctctgtatcaccacactgtggggactcaaagcctccatcccggggtcagggaggggactagggtgaagggacaggttgtgagggactgggaaagggccctgccttncagcctttgaggagggaggagggagggnttgantttgaggagggcaagctgggggtaatttcacctggaggntggccttttacccttttgtttaaccantttggggggatttnccagnggggaggggggttttttccttgagggnaccattttngaaggat

SEQ ID NO: 624 - DNA, 491 bp, Homo sapiens
  misc_feature (1)..(491): "n" represents an unknown nucleotide
ttcaatggtgttgctgaacttcttgaaatattaggaagtattatcaatggctttgcattgccactgaaagcagaacataaacaatttctaatgaaggttcttattcctatgcatactgcaaaaggattagctttgtttcatgctcagctagcatattgtgttgtacagttcctggagaaagatacaacactaacagagccagtgatcagaggactgttgaaattttggccaaaaacctgcagtcagaaagaggtgatgtttttaggagaaattgaagaaatcttagatgtcattgaaccaacacagttcaaaaaaattgaagagccacttttcaagcagatatccaagtgtgtatccagttctcattttcaggttgcagaaagggcattgtacttgctgggaatagcgaatatattcttagtttggattgaggaganccttgatnaaattctgcccattattgtttgccngtttgtaccaaatttnccaaa

SEQ ID NO: 625 - DNA, 4151 bp, Homo sapiens
cgcaacttcatagacggttgtgaagacaagctagacggcagatgaaagttcttggcacagagtgaacacttgataaactatatggcagccacagcctccggagccgttgcacacctacctgcccggccgacttacctgtacttgccgccgtcccggctcacctggcggtgcccgaggagtagtcgctggagtccgcgcctccctgggactgcaatgtgccgatcttagctgctgcctgagaggatgtctggggtgtccgagcccctgagtcgagtaaagttgggcacgttacgccggcctgaaggccctggagagcccatggtggtggtaccagtagatgtggaaaaggaggacgtgcgtatcctcaaggtctgcttctatagcaacagcttcaatcctgggaaaaacttcaaactggtcaaatgcactgtccagacggagatccgggagatcatcacctccatcctgctgagcgggcggatcgggcccaacatccggttggctgagtgctatgggctgaggctgaagcacatgaagtccgatgagatccactggctgcacccacagatgacagtgggtgaggtgcaggacaagtatgagtgtctgcacgtggaagccgagtggaggtatgaccttcaaatccgctacttgccagaagacttcatggagagcctgaaggaggacaggaccacgctgctctatttttaccaacagctccggaacgactacatgcagcgctacgccagcaaggtcagcgagggcatggccctgcagctgggctgcctggagctcaggcggttcttcaaggatatgccccacaatgcacttgacaagaagtccaacttcgagctcctagaaaaggaagtggggctggacttgtttttcccaaagcagatgcaggagaacttaaagcccaaacagttccggaagatgatccagcagaccttccagcagtacgcctcgctcagggaggaggagtgcgtcatgaagttcttcaacactctcgccggcttcgccaacatcgaccaggagacctaccgctgtgaactcattcaaggatggaacattactgtggacctggtcattggccctaaagggatccgccagctgactagtcaggacgcaaagcccacctgcctggccgagttcaagcagatcaggtccatcaggtgcctcccgctggaggagggccaggcagtacttcagctgggcattgaaggtgccccccaggccttgtccatcaaaacctcatccctagcagaggctgagaacatggctgacctcatagacggctactgccggctgcagggtgagcaccaaggctctctcatcatccatcctaggaaagatggtgagaagcggaacagcctgccccagatccccatgctaaacctggaggcccggcggtcccacctctcagagagctgcagcatagagtcagacatctacgcagagattcccgacgaaaccctgcgaaggcccggaggtccacagtatggcattgcccgtgaagatgtggtcctgaatcgtattcttggggaaggcctttttggggaggtctatgaaggtgtctacacaaatcataaaggggagaaaatcaatgtagctgtcaagacctgcaagaaagactgcactctggacaacaaggagaagttcatgagcgaggcagtgatcatgaagaacctcgaccacccgcacatcgtgaagctgatcggcatcattgaagaggagcccacctggatcatcatggaattgtatccctatggggagctgggccactacctggagcggaacaagaactccctgaaggtgctcaccctcgtgctgtactcactgcagatatgcaaagccatggcctacctggagagcatcaactgcgtgcacagggacattgctgtccggaacatcctggtggcctcccctgagtgtgtgaagctgggggactttggtctttcccggtacattgaggacgaggactattacaaagcctctgtgactcgtctccccatcaaatggatgtccccagagtccattaacttccgacgcttcacgacagccagtgacgtctggatgttcgccgtgtgcatgtgggagatcctgagctttgggaagcagcccttcttctggctggagaacaaggatgtcatcggggtgctggagaaaggagaccggctgcccaagcctgatctctgtccaccggtcctttataccctcatgacccgctgctgggactacgaccccagtgaccggccccgcttcaccgagctggtgtgcagcctcagtgacgtttatcagatggagaaggacattgccatggagcaagagaggaatgctcgctaccgaacccccaaaatcttggagcccacagccttccaggaacccccacccaagcccagccgacctaagtacagaccccctccgcaaaccaacctcctggctccaaagctgcagttccaggttcctgagggtctgtgtgccagctctcctacgctcaccagccctatggagtatccatctcccgttaactcactgcacaccccacctctccaccggcacaatgtcttcaaacgccacagcatgcgggaggaggacttcatccaacccagcagccgagaagaggcccagcagctgtgggaggctgaaaaggtcaaaatgcggcaaatcctggacaaacagcagaagcagatggtggaggactaccagtggctcaggcaggaggagaagtccctggaccccatggtttatatgaatgataagtccccattgacgccagagaaggaggtcggctacctggagttcacagggcccccacagaagcccccgaggctgggcgcacagtccatccagcccacagctaacctggaccggaccgatgacctggtgtacctcaatgtcatggagctggtgcgggccgtgctggagctcaagaatgagctctgtcagctgccccccgagggctacgtggtggtggtgaagaatgtggggctgaccctgcggaagctcatcgggagcgtggatgatctcctgccttccttgccgtcatcttcacggacagagatcgagggcacccagaaactgctcaacaaagacctggcagagctcatcaacaagatgcggctggcgcagcagaacgccgtgacctccctgagtgaggagtgcaagaggcagatgctgacggcttcacacaccctggctgtggacgccaagaacctgctcgacgctgtggaccaggccaaggttctggccaatctggcccacccacctgcagagtgacggagggtggggccacctgcctgcgtcttcgcccctgcctgccatgtacctcccctgccttgctgttggtcatgtgggtcttccagggagaaggccaaggggagtcaccttcccttgccactttgcacgacgccctctccccacccctacccctggctgtactgctcaggctgcagctggacagaggggactctgggctatggacacagggtgacggtgacaaagatggctcagagggggactgctgctgcctggccactgctccctaagccagcctggtccatgcagggggctcctgggggtggggaggtgtcacatggtgcccctagctttatatatggacatggcaggccgatttgggaaccaagctattcctttcccttcctcttcggccctcagatgtcccttgatgcacagagaagctggggaggagctttgttttgggggtcaggcagccagtgagatgagggatgggcctggcattcttgtacagtgtatattgaaatttatttaatgtgagtttggtctggactgacagcatgtgccctcctgagggaggacctggggcacagtccaggaacaagctaattgggagtccaggcacaggatgctgtgttgtcaacaaaccaagcatcagggggaagaagcagagagatgcggccaagataggaccttgggccaaatccgctctcttcctgcccctctttctctttcttcctttactttcccttgcttttccctcttttcttactcctcctctttctctccccaacccccattctcatctgcacccttcttttctcatgtgtttgcataaacattcttttaacttctttctatttgacttgtggttgaattaaaattgtcccatttgcttg

SEQ ID NO: 626 - DNA, 303 bp, Homo sapiens
  misc_feature (1)..(303): "n" represents an unknown nucleotide
caaagcaaatgggacaattttaattcaaccacaagtcaaatagaaagaagttaaaagaatgtttatgcaaacacatgagaaaagaagggtgcagatgagaatgggggttggggagagaaagaggaggagtaagaaaagagggaaaagcaagggaaagtaaaggaagaaagagaaagaggggcaggaagagagcggntttggcccaaggtcctatcttggccgcatctctctgcttcttccccctgatgcttggtttnttgacaacacagcatcctgtgcctggnctcccaattagcttgttcc

SEQ ID NO: 627 - DNA, 2103 bp, Homo sapiens
ctcgagatccattgtgctctaaagagtctccaccgccgtccaggacccacttgcagcatggagtcgcccgcctcgagccagcccgccagcatgccccagtccaaaggaaaatccaagaggaagaaggatctacggatatcctgcatgtccaagccacccgcacccaaccccacacccccccggaacctggactcccggaccttcatcaccattggagacagaaactttgaggtggaggctgatgacttggtgaccatctcagaactgggccgtggagcctatggggtggtagagaaggtgcggcacgcccagagcggcaccatcatggccgtgaagcggatccgggccaccgtgaactcacaggagcagaagcggctgctcatggacctggacatcaacatgcgcacggtcgactgtttctacactgtcaccttctacggggcactattcagagagggagacgtgtggatctgcatggagctcatggacacatccttggacaagttctaccggaaggtgctggataaaaacatgacaattccagaggacatccttggggagattgctgtgtctatcgtgcgggccctggagcatctgcacagcaagctgtcggtgatccacagagatgtgaagccctccaatgtccttatcaacaaggagggccatgtgaagatgtgtgactttggcatcagtggctacttggtggactctgtggccaagacgatggatgccggctgcaagccctacatggcccctgagaggatcaacccagagctgaaccagaagggctacaatgtcaagtccgacgtctggagcctgggcatcaccatgattgagatggccatcctgcggttcccttacgagtcctgggggaccccgttccagcagctgaagcaggtggtggaggagccgtccccccagctcccagccgaccgtttctcccccgagtttgtggacttcactgctcagtgcctgaggaagaaccccgcagagcgtatgagctacctggagctgatggagcaccccttcttcaccttgcacaaaaccaagaagacggacattgctgccttcgtgaaggagatcctgggagaagactcataggggctgggcctcggaccccactccggccctccagagccccacagccccatctgcgggggcagtgctcacccacaccataagctactgccatcctggcccagggcatctgggaggaaccgagggggctgctcccacctggctctgtggcgagccatttgtcccaagtgccaaagaagcagaccattggggctcccagccaggcccttgtcggccccaccagtgcctctccctgctgctcctaggacccgtctccagctgctgagatcctggactgagggggcctggatgccccctgtggatgctgctgcccctgcacagcaggctgccagtgcctgggtggatgggccaccgccttgcccagcctggatgccatccaagttgtatatttttttaatctctcgactgaatggactttgcacactttggcccagggtggccacacctctatcccggctttggtgcggggtacacaagaggggatgagttgtgtgaataccccaagactcccatgagggagatgccatgagccgcccaaggccttcccctggcactggcaaacagggcctctgcggagcacactggctcacccagtcctgcccgccaccgttatcggtgtcattcacctttcgtgttttttttaatttatcctctgttgattttttcttttgctttatgggtttggcttgtttttcttgcatggtttggagctgatcgcttctcccccaccccctagggtaccagcaggcagagccttgccctctgctcaggctggggtccagtgggaggggcccaaaatctctgctcagagaagtgcagggggagccttccagctcactctccctgaggactggcgtgacaggggctatgggtgttgtttttaaaaaaagaaaatatatttttttgaaaaaacgactgcccatcccgggtcctttccctgatgggttggggcagttacctggttgctgttttaattaaaaactttagagcacaatggatctcgag

SEQ ID NO: 628 - DNA, 431 bp, Homo sapiens
  misc_feature (1)..(431): "n" represents an unknown nucleotide
ttttnttttttccttttttttttttttttttaattaaaacagcaaccaggnaactgccccaacccatcagggaaaggacccgggatgggcagtcgttttttcaaaaaaatatattttctttttttaaaaacaacaccaaagcaaacccatagcccctntcaagccagtcctcagggagagtgagctggaaggntccccctgcacttctctgagcagagatcttgggcccctcccantggaccccagcctgagcagagggcaaggntctgctgctgggtaccctagggggtgggggagaagcgntcagcttccaaaccatgcaagaaaaacaaggccaaacccattaaagcaaaagaaaaatttcaacagaggtttaattttaaaaaaaacacgganaggtggattggacaccgtttaacggtgggccgggc

SEQ ID NO: 629 - DNA, 187 bp, Homo sapiens
  misc_feature (1)..(187): "n" represents an unknown nucleotide
acctnacatggcccctgagaggatcaacccagagctgaaccagaagggctacaatgtcaagtccgacgtctggagcctgggcatcaccatgattgagatggccatcctgcggttcccttacgagtcctnggggaccccgttccagcagctgaagcaggtggttgaggagccgtccccccagctccca

SEQ ID NO: 630 - DNA, 2136 bp, Homo sapiens
gccctggaggcccggcctggccgctcccggccctggggtgcacatcggccctgagtcccgtcccaggctctgggctcgggcagccgccgccaccgctgcccaggacgtcgggcctcctgccttcctcccaggcccccacgttgctggccgcctggccgagtggccgccatgctcctgccttgggccacctctgcccccggcctggcctgggggcctctggtgctgggcctcttcgggctcctggcagcatcgcagccccaggcggtgcctccatatgcgtcggagaaccagacctgcagggaccaggaaaaggaatactatgagccccagcaccgcatctgctgctcccgctgcccgccaggcacctatgtctcagctaaatgtagccgcatccgggacacagtttgtgccacatgtgccgagaattcctacaacgagcactggaactacctgaccatctgccagctgtgccgcccctgtgacccagtgatgggcctcgaggagattgccccctgcacaagcaaacggaagacccagtgccgctgccagccgggaatgttctgtgctgcctgggccctcgagtgtacacactgcgagctactttctgactgcccgcctggcactgaagccgagctcaaagatgaagttgggaagggtaacaaccactgcgtcccctgcaaggcagggcacttccagaatacctcctcccccagcgcccgctgccagccccacaccaggtgtgagaaccaaggtctggtggaggcagctccaggcactgcccagtccgacacaacctgcaaaaatccattagagccactgcccccagagatgtcaggaaccatgctgatgctggccgttctgctgccactggccttctttctgctccttgccaccgtcttctcctgcatctggaagagccacccttctctctgcaggaaactgggatcgctgctcaagaggcgtccgcagggagagggacccaatcctgtagctggaagctgggagcctccgaaggcccatccatacttccctgacttggtacagccactgctacccatttctggagatgtttccccagtatccactgggctccccgcagccccagttttggaggcaggggtgccgcaacagcagagtcctctggacctgaccagggagccgcagttggaacccggggagcagagccaggtggcccacggtaccaatggcattcatgtcaccggcgggtctatgactatcactggcaacatctacatctacaatggaccagtactggggggaccaccgggtcctggagacctcccagctacccccgaacctccataccccattcccgaagagggggaccctggccctcccgggctctctacaccccaccaggaagatggcaaggcttggcacctagcggagacagagcactgtggtgccacaccctctaacaggggcccaaggaaccaatttatcacccatgactgacggagtctgagaaaaggcagaagaaggggggcacaagggcactttctcccttgaggctgccctgcccacgtgggattcacaggggcctgagtagggcccggggaagcagagccctaagggattaaggctcagacacctctgagagcaggtgggcactggctgggtacggtgccctccacaggactctccctactgcctgagcaaacctgaggcctcccggcagacccacccaccccctggggctgctcagcctcaggcacggacagggcacatgataccaactgctgcccactacggcacgccgcaccggagcacggcaccgagggagccgccacacggtcacctgcaaggacgtcacgggcccctctaaaggattcgtggtgctcatccccaagcttcagagaccctttggggttccacacttcacgtggactgaggtagaccctgcatgaagatgaaattatagggaggacgctccttccctcccctcctagaggagaggaaagggagtcattaacaactagggggttgggtaggattcctaggtatggggaagagttttggaaggggaggaaaatggcaagtgtatttatattgtaaccacatgcaaataaaaagaatgggacctaaactcgtgccgctcgtgccgaattcctgcag

SEQ ID NO: 631 - DNA, 332 bp, Homo sapiens
  misc_feature (1)..(332): "n" represents an unknown nucleotide
ttaagatgtggagcattaaggcattttcagaggcgcccccccctgtgtccctcagccctggtccctcacctgacatctctgggggcagtggctctaatggatttttgcaggttgtgtcggactgggcagtgctggagctgcctccaccagaccttggttctcacacctgcagaggaaaaaaagatgatgaccttttcacgccctggcccaccagtgtcccgactccactgggcaggcggggaggctgaaagtggtgagtcgagtccgtggtgtcaaggataggcgctgggggttgttagcagctgaggcttctcagagggtngaaggagctt

SEQ ID NO: 632 - DNA, 343 bp, Homo sapiens
  misc_feature (1)..(343): "n" represents an unknown nucleotide
gcagagttgggaaaggtgagagctacgcaatggggtggatgggcatcctgaggcttaaaggaaactcacaggccggcaaagggcccctcccttttgcccattcaccctggctggcctgcctttctcttgccagatgaagttgggaagggtaacaaccactgcgtcccctgcaaggcagncactttccagaatacctcctcccccagcgcccgctgccagccccacaccaggtgagtgcagccccacccaagcttcctttccaccctnttgagaagcctcagcttgcttaacaacccccaggcgnctattcctttgacaccacggnatttgaattnaccatttt

SEQ ID NO: 633 - DNA, 484 bp, Homo sapiens
tttttttttttccaagttatggcttttaatggaaagcagaataagaaagtctttcctgatgtctacttcatcaagtagagagagggagttacaagtttcttattttttttttttcttgagacggagtcttgctctgtcacccaggttcaagcgattgtcctgcctcagcctcccgagtagctaggactacaggcgcccaccaccatacctggctaattttttgtatatttactagagacggggtttcgccatattagccaggatggtctcgatctcctgacctcgtgatccccctgcctcggcctcccaaagtgctgggactataggcgtgagccaccacacgtggccacaactttttttttaatggcctaatctgtttctcagcatacgaacactgtatctcactcccagacaactgatgccattcatgcttgaagaagaaatccatgaccaggtaccaaagaaggctaaatataaaggcagt

SEQ ID NO: 634 - DNA, 435 bp, Homo sapiens
gctacaccagagcgttgggaccatgctcccattaatcaccctgtctcaaacaacatgctttaccttcattcgttgatttactcatccattccttctcatagtttttaacctcaagagctctgaggttcagggtggaataatatggagggcctttgagaggctaacttttgaaccaaatcttcgaggatgaactagggtagtggcaggtagaaaactgcctttatatttagccttctttggtacctggtcatggatttcttcttcaagcatgaataggatcagttgtctgggagtgagatacagtgttcgtatgctgagaaacagattaggccattaaaaaaaaagttgtggccacgtgtggtggtcacgcctatagtccagcactttgggaggctgggcagggggatccgaggcaggagatcggacatctggcta

SEQ ID NO: 635 - DNA, 278 bp, Homo sapiens
tttttttttttttttgacagagcgagacactgtctcaaacaaaaaacaccagattgacttttgatcatctttccttatggaatattacaaagatagtgtcaaaagatggaaaagacaagaactagagagaaagcagattccatttcagatgaagggagacctgggctaagccttcagcttcagagagcctggggtggatgaagaggagcaagcacttgggatggtttgggttttccagctgaaatatgttacccttctgtcgtcttctcgcagccgta

SEQ ID NO: 636 - DNA, 307 bp, Homo sapiens
atgatcgctcgacatcgatacgacttttttttttttttttttttttttgacagagcgagacactgtctcaaacaaaaaacaccagattgacttttgatcatctttccttatggaatattacaaagatagtgtcaaaagatggaaaagacaagaactagagagaaagcagattccatttcagatgaagggagacctgggctaagccttcagcttcagagagcctggggtggatgaagaggagcaagcacttgggatggtttgggttttccagctgaaatatgttacccttctgtcgtcttctcgcagc

SEQ ID NO: 637 - DNA, 130 bp, Homo sapiens
gagaagacgacagaaggggaagaagacgaatgagtgatacttaaatgtattttttactttaatgtgttcattatgggaaatttagaaatcataagcaaaaaaaaaaaaaaaaaaaaaaaagtcgtatcga

SEQ ID NO: 638 - DNA, 244 bp, Homo sapiens
gagaagacgacagaagggacctagaaaatagaattctggagctttaggagacaaatggtcaatatttcttcaaggatctcacagaatttaggaattgtatggttacattatatcaggggtgtccaatcttttagcttccctggaccacattggaagaagaattgtcttgggccacacattaaatacactaacaatgatagctgatgaactaaaaaaaaaaaaaaaaaaaaaaaagtcgtatcga

SEQ ID NO: 639 - DNA, 83 bp, Homo sapiens
tatacggctgcgagaagacgacagaagggatctttgtactttcagaaaaaaaaaaaaaaaaaaaaaaaaagtcgtatcgatgt

SEQ ID NO: 640 - DNA, 320 bp, Homo sapiens
  misc_feature (1)..(320): "n" represents an unknown nucleotide
tttttttttttttttttttttttttttttttttttttttttttttttttttttttttttttttttttttttttttttttttttttttttttaagggggggggaaaaaaaagaaaaatcccccccaaaaaaaaaaaaaaaaaagggatttgggcccaggttgggccaagggggaaccccaaaaaaaagggcccccgggggggccccggggggccacaaaaccccggaaattccggccccggcccanccgggttttttggccaaactgggtcaaaaggggcccccaaaagggcccaaggggcaaaggggttcccggggaaaa

SEQ ID NO: 641 - DNA, 373 bp, Homo sapiens
ttttttttttttttttttttttttttttttttttttttttttttttttttttttttttttttttttttttttttttccaccgggggttaatgaccaaccggggggccctaaaaccacccgcccgggggggcccccaaagggggggaaaaaggaaggggggggggggggggttttcccccaaacccccttaggggggggggggacccgggcccacccgggagggccctaaaaaccaaaaaaaccaagtagggccccggcccaaagccgttttaaaggaaacaccaccccaggccccaagggccccaaactttggggggtggtttttgccccccaccccaggggggggagcccctgggccccccttttttttaaa

SEQ ID NO: 642 - DNA, 555 bp, Homo sapiens
tttttttttttttttttttttttttttttttttttttttttttttttttttttttttttttttttttttttttttttttttttttttttttttttttttttttttcccccccaaaaaaaaggtttaaatgggcgggggccccaaaaggggggggggtttaaaattaaaaaccaccccccccccccccctccccgagggaaaaaaaagggggggaaaacccccgggggcccccggggggggcccccccctaaaaaaaaggggggggggccacccccgggggggggggggccccccggaaaccccccccttaaaaaggggggggaaaaaaaaaaaagggcccccctgggaaacccccccccccccccccggggggggttcctttcttaaaggggaaagggggggggcggggggggttaaaaaaaacccccccgggcacacaaaaaggtttctttttcccccccccaaaccttaaagaaaaaagcatggagggggggccgagaaaaaaaaagacgcgcccgggctcacaagggggccctttttaaagagaaaaggggg

SEQ ID NO: 643 - DNA, 631 bp, Homo sapiens
  misc_feature (1)..(631): "n" represents an unknown nucleotide
ttttttttttttttttttttttttttttttttttttttttttttttttttttttttttttttttttttttttttttttttggggaaaaaaaaaaaacttaaagggggccccaaaaacaagttctttttccccggcaaaagttgggtcccccggaaacccccaacccggggggaaaaaaaaaaacccacttgggggccaaaaggggcatctttggggaggggggggggctccccaaagggcgggggggggcccccccaaaaagggggccccaaaggaataagggcccccccccgaacccggggccaaaagtccctttttgcctaaaattggggggccccccggccacccctaaaaaggggttgtgaaattgggccccccccaccccccaacccaaccaaagtttggggggggggggaaaaaaccttttgggacccggggggcancttaacacgggtctttttggcccaagggtgggggaaaaaaacgggggcatattcccctgaggcccggcccaacttgccacgggttcaaggcttttcctccaggcagacaaagatatgccccctaggcatggcgcccacagggagccaaaggcaatggtgagctgggcctttcgccccaaaacacaaac

SEQ ID NO: 644 - DNA, 189 bp, Homo sapiens
  misc_feature (1)..(189): "n" represents an unknown nucleotide
ttttttttttttttttttttttttttttttttttttttgggggggagggaaaatgaggagatgttggcccaaanggcccaaaccttgatttttcatttatttgttaattaaacccaatagaactgaaaaaaataaaagcccgatatagcaaaaaaggaaaaacgccgcaaatctttgctggatgagatc

SEQ ID NO: 645 - DNA, 438 bp, Homo sapiens
ttttttttttttttttttttttttttttttttttttttttttttttttttttttttttttttgggaaacccaaaattaaattaaaaaaaaatttgggtgggagttctaacattctaagggggagccaatcggggacccacggccccacccaaaaggggcccaacccggggggcaggggaaaaaggggggggggaaaagaaaaaacccccgttcttcccaagggcgggggggggggaaaccccaccccctttggctgccctcctcggggccccaggaaggaaagcaaaaaaaatctaaggcctggggtttttccaccccactgccccccaggtgggaggggagctaaaaaatgaaaaaaggggacagaggccaaaaaaagatgtgttcaaaaaagatgaaacccccggggtggggggtgaaggagaatcaaaaaataaa

SEQ ID NO: 646 - DNA, 351 bp, Homo sapiens
  misc_feature (1)..(351): "n" represents an unknown nucleotide
ttttttttttttttttttttttttttttttttttttttttttttttttttttggcccccaaggaacaaattttgggggtttattttaaaattcaagacaattttttggcaaaggctgattaaaaacgtcccaatccccatttatcatgcctatgccaaaacaatcgggcacaaaaaagttggcttttcattgccacatagcttgggggacggggggccttttaaaatcactgcccagttgctgcaagggggaggccaacaccccacggnggggatgcaggggggaacccatggttaatctggggccctggacaaaggccacaaatggggttgaaaggggaaaagcggtaac

SEQ ID NO: 647 - DNA, 306 bp, Homo sapiens
ttttttttttttttttttttttttttttttttttttttttttttttttttttttttttttttttttttttctttttttttttttttttttttttttttttttttttttttttttttttaaaaaaaaccccttttttaaaaaaaggggggggggaaaaaaaaaaaaaaggaaaaacccccccccccaaaggggggggggaaaaaaccccggggggggggccccccccccccccccaaaaaaaccccaaaaaaagggggggggggggggggttaaaaaaaaaaaaccccccccccccccggggggggg

SEQ ID NO: 648 - DNA, 372 bp, Homo sapiens
agcatttaaatataaatttatttttttacatcacctgagaaaaagaggaaagaaacatcctgttccctccatggacagaaacatagcctctttatagctaaaacactatgagttcctgtcagttcatttccccctgcgactcataatgacttatttcgaagctactttatgttgttgttgttacaggcaggaccgtgagacgtgtacttgagtcaccgtgacatcttcctgtctcattttcgtttgtttcagtttggttttgccttgtttttttttttttttttttttttgcaagttctatcgcaaacacatatactgaggcagaaagttaaattaagatctaatgcagttatctcaaaattaaggaaccag

SEQ ID NO: 649 - DNA, 260 bp, Homo sapiens
tttttttttttttttttttttttttttttttttttttttttttttttttttttttttttttttttaaaaggcaggccataaccaaaacagggccttgtaccaaaaccaccgggagggccaaaattggggggccaggcccccataaaaaaccccccatttgccccccaaggcggggggggggacccccccctgggccccccccggctgggcggggaaaaaccccggggggcagaaaacaaaggggctttgggttccccttt

SEQ ID NO: 650 - DNA, 246 bp, Homo sapiens
tttttttttttttttttttttttttttttttttttttttttttttttttttttttttttttttttttttttttttttttttttttccccccaaaaaaaggggtaaatggggagggggcccgaagggggggggggcctaaaattcaaaaaacaccccccccccccccggccagggggaaaaaaaaggcggggcaaccccccccggaccccccgggggggggcccccctttaaaaaaggggggggggc

SEQ ID NO: 651 - DNA, 380 bp, Homo sapiens
tttttttttttttttttttttttttttttttttttttttttttttttttttttttttttttttttttttttttcgggacccgggccccccaaaaaccaggggaaataaaaaccccaaaaaaaaaagaaggaaaccaaaagggggaaccccaaaaaaacaaccccaagggaaacccccccccaagcccttgggcagggaggggaaccaccaccaaaaaaaatccaaaacccccggaagcccccccaaaaaacggggcccgggggaaaaaaaaattgggccataaaatgggccaaacaaaaggttttcccataagaaacccagggggggggacccaaaaaggggaaaaaaaaagggaaaaaaaaaccttaaaaaggcaaggg

SEQ ID NO: 652 - DNA, 414 bp, Homo sapiens
  misc_feature (1)..(414): "n" represents an unknown nucleotide
ttttttttnngtgcttcaaattaaatacttttaattatcattctagccaggatcatactaagtaggatctcatgacangtcacatatgcagcgacttcacctaaaccgtggcactgaatgctctgccatgagccacaagcagcacagtgatcatcacccacaaggacaggttgctgggatgaggcaccctttcctttcatgtttaggttcttctcacctgcatttcactttcctaaaggtcccagccacacagcgttcttttaggggattaaagtagtaggggnaaaaataaagaggacacaacatccatcctttaaaggggaaaaaggtaaatccnctttatgggnggggctttcagctattggggcaaatttngggggtcagntgtttttnccagntctggnacctngggct

SEQ ID NO: 653 - DNA, 506 bp, Homo sapiens
  misc_feature (1)..(506): "n" represents an unknown nucleotide
ggccggtgagcgcctggggaccgcagaggtgagagtcgcgcccgggagtccgccgcctgcgccaggatggagttcgtgaaatgccttggccaccccgaagagttctacaacctggtgcgcttccggatcgggggcaagcggaaggtgatgcccaagatggaccaggactcgctcagcagcagcctgaaaacttgctacaagtatctcaatcagaccagtcgcagtttcgcagctgttatccaggcgctggatggggaaatgcgcaacgagtgtngcatnattttatctggttctccgagctctggacacactggaagatgacatgaccatcagtgtggaaaagaaggtcccgctgtttacacaattttcattttttccttttaccaaccagattggcggtttcntgggagagcaaggagaaggntcgccagttgtttggaggattttcccaacgtttttncttttgatttttaggaatttttggttgnagaatttnccaaacattg

SEQ ID NO: 654 - DNA, 480 bp, Homo sapiens
  misc_feature (1)..(480): "n" represents an unknown nucleotide
tttttttttgattaaagaacaggtttattggtgacctgagggagccaaggtctcctttgtgaccctcactcccaggtggtatcaggctgcaaggccctctatgggtagaaaagccaatcacatgatccatgggcattcctggcaagaggtcagatctctctactcctaattcgaaaacttccaaatcctgatttcagagtcaacagcaaggtcagaggctagagtcctgatggggcatgggagctcaggaggctgggcgagttgctcagcaacgtctgtgggggctgcgcacatgggaagtaggaggccagggaaggccacagggaaaattgccccaaaagaagtttccaagagggttttacgttttgggacagggcataggaacctnggcccttgagatttgcacttttgggttttgatgggggtccantcacccnagcaggcctngggggagcagagaaccttccccattttnccctg

SEQ ID NO: 655 - DNA, 121 bp, Homo sapiens
  misc_feature (1)..(121): "n" represents an unknown nucleotide
tgntnccggatcccnancgcttccctcatgncattcctttcctggctgnctacgttcactccctgggcctgangttgggtntctacncggacntggncnncttcacctncatgggttaccc

SEQ ID NO: 656 - DNA, 380 bp, Homo sapiens
  misc_feature (1)..(380): "n" represents an unknown nucleotide
ttttttttttngacgtgtctatcggaacgactttatttcagtacactgggccccaccaggcaatgtggtttntgcgaggctgtgcgagggacaggcttgggctaagagaagggaggtgagttggttaagcgcactgcagtccgcggggcctnacgttgctttcacacatacctgctgctgtggcccacacctggncaggggcctttggtcataggacggcgtgggggagaatactgtgtgaagtctgggattggggtgggtcttggtntcacaggtnagggtgccggtgaagacaggctggccccagctttgcaccatctaggctgaaggcttttgggaccactcctagggantcaggcctggctccattagctcctggn

SEQ ID NO: 657 - DNA, 328 bp, Homo sapiens
  misc_feature (1)..(328): "n" represents an unknown nucleotide
gatagcgaaagaagcaggagagcaagtcaagaaatacggtgaaggagtccttcccaaagttgtctaggtccttccgcgccggtgcctggtcttcgtcgtcaacaccatggacagctcccgggaaccgactctggggcgcttggacgcgctggcttctggcaggtctggcagcgctttgatgcggatgaaaaaggttacatagaagagaaggaactcgatgctttctttctccacatgttgatgaaactggggtacttgatgacacggtcatggaaagcaantttgcacaaggttgaaacagcagttttattgacttaccccaaggatt

SEQ ID NO: 658 - DNA, 329 bp, Homo sapiens
  misc_feature (1)..(329): "n" represents an unknown nucleotide
tttttttttttnaaaaactcacattgatttattagaatatgaaaaagattcagtttcttctgtacaggcagcagagtggcagcagctgcggtggcttggtacgtggttgtcgatgtcacccttgcatggtgactcctgcccaaacagcacttgcatggagaggaggatggacagatgggccgaggacccatggcccagtcccctgacaaaaagggacactctgactattgcacaatcctggggggagtnccccagggtacaaggggaaggagtnttgtgtgggncaaaggtctctgggggcccaggattctgcccaatccaccagcccc

SEQ ID NO: 659 - DNA, 290 bp, Homo sapiens
  misc_feature (1)..(290): "n" represents an unknown nucleotide
acatggctgggggagggactgctgacccaccaaggtctcacactcctcctgccagctctgtcaccctggccaccacccaacctgtccttactcagagctgcgggctgagggcatctctgagtgtctctgcctgggagcaggggtggtttctacggtgacagtgacgtgactcagagcttttcgaactgtgctcccacggggaccactgggcccttcaggggaagctgctaggggaaggactggcctggctccagaatgttgttgcctttttaagttttgtttnttcacat

SEQ ID NO: 660 - DNA, 440 bp, Homo sapiens
  misc_feature (1)..(440): "n" represents an unknown nucleotide
tttttttttttactattcaaagtttactgacctccccagaccaggcaggccaacccttccgagcaggggaaatgtccatctagctgccctctgctgggttgcagcctatgccatgagagggtactggaagcaggagggagccctggctaggnagggccttaaacgcaagggaagctgagcagagatctgcacactcaaccccatttgatattcttctcctcctcagtcatgggccagcgtgttggtgactaggaccggtgccaatagtccggttgccatctcgcagggtgaaacgctgggcctttctcttaaggatcattgggctgccgcaagattagggttggaactttcagggtcctccccggggcatgggcaaggctcctttttctgggggggcagggattaattccgacagggccatgttcccaagttcaggggag

SEQ ID NO: 661 - DNA, 503 bp, Homo sapiens
  misc_feature (1)..(503): "n" represents an unknown nucleotide
ttttttttttaatataaattatagctttattttttaaaaagattttataagtctgtcacaacctcaaacacatataggtgaattatttattcctctcttccatcagatgaggcttatcgtgtcaaatcctctgaaaaatataagtaaaaattatttttcacaaatatatatcccctatattactcaacttagttctgaaattttctccttataaatactttaacacagctgctagtgggaaggactgtgttgtgcagctgccatagctataattttataagtctgctttacttttgctagctccctggntcagctccaaggtccaaatcttataaatggntaactggggctgccagnaaagcccactggaatggcatcctgtaggtgctctgtgacaaggcaagaggaaggaagttttaggcctccnggcaagggtccngtgggngagggcagctctggacctgggtttaattacccaagtcttcctaggcanctcaaggntt

SEQ ID NO: 662 - DNA, 394 bp, Homo sapiens
  misc_feature (1)..(394): "n" represents an unknown nucleotide
ttcagggtacaactctttgaagatcccactgttgacaaggaggttgagatcaggaaaaaagtgctaaagatatacaataaaagggaagaagattttcctagtctaagagaatacaatgatttcttggaagaagtggaagaaattgttttcaacttgaccaacaatgtggatttggacaacaccaaaaagaaaatggagatataccaaaaggaaaacaaagatgttattcaggaaaaataaattaaagctgactcgaggaacagggaaggaactgggaaggaagctttaggaagtgggaacgacagggaaaatggaaccaaaggaaggttattttattaccaaaaaggaaggaaccaacttgcagcnggtttcttnaaaagggaaggatttaggc

SEQ ID NO: 663 - DNA, 410 bp, Homo sapiens
  misc_feature (1)..(410): "n" represents an unknown nucleotide
ttttttttttttttttttttcccnggttgaggcattttattggacctttggcaattggtggtggggaggcatctgctccaactggtgcggggccctgcagatgggaccatctcaggctgggtccttgtagcccaggagcacagactggactaagcctcctgggccttgtatgaaaaaggtnttgtaccnggccgtttttgccagtaataatcaataaaataaccataataaaaatcaaaggctctgttctgaccactcttcaggtcttccgctgaaacggaaaagtgcaaagcaattgaagtacatatggcagtttgtcttaacctcaaatagtgccagtcccanttcctttcctctgatagtttgttcagttcagcagatgcaggaggggntgggctgttntcctttgg

SEQ ID NO: 664 - DNA, 562 bp, Homo sapiens
  misc_feature (1)..(562): "n" represents an unknown nucleotide
gatcccatgatccctgatgcagagtgcctgaagatcatgtgcgagatcctgagttcacttcagataggcgacttcctggtcaaggtaaacgatcgacgcattctagatgggatgtttgctatctgtggtgtttctgacagcaagttccgtaccatctgctcctcagtagacaagctggacaccttgtccacttgtctactgaggacagaattgagnatggtggggagagaagggccttgcacctgaggtgggctgaccgcattggggactatgtccagcaacatggtggggtatccctggtggaacagctgctccaggatcctaaactatcccaaaacaagcaggccttggagggctggggagacctgaagttgctctttgagtacctgaccctatttgggcattgattgacaaaatnttccttttgacctgaggccttgctcgaggggttgggatttattacattgggggttgatcttttgagggcagttgttnttacagaccccagcccaggcanggggaaagagcccttgggtnttgggcaatttttggctncttggag

SEQ ID NO: 665 - DNA, 483 bp, Homo sapiens
  misc_feature (1)..(483): "n" represents an unknown nucleotide
ttttttttttttttcacggttccttcttttgcctcaaaaagtgacatttattcaaagaaaaaaaatgacaagatgtccatcccttggctcccttccctcccccctcctgctgctcctcagcccccagagattgagccctggctggggctgggtggcaggacagcccctcagatgaggtcagcaacattgaggggcatttcctcaatggaggtgttgtagaaggtctcaatgtctcgaagagtcctcttgtcttcttctgtcaccatgttaatagccacacctttacggccaaaccgtccacctcggaccgattctgtgggatatagttttccctgttgggtggggaaggtcatagttgatgactaaagaaacctgctggcanatcaatggcctctggccaggcagggtcagtgggtaattcaaaactctggttaggagccagaacgaaattccctcataattcacgtttcgtttcctttnggt

SEQ ID NO: 666 - DNA, 502 bp, Homo sapiens
  misc_feature (1)..(502): "n" represents an unknown nucleotide
tggccccgatgggatggagcccgaagcgtncatcgagagtaactggaatgagattgttgacagctttgatgacatgaacctctcggagtcccttctccgtggcatctacgcctatggttttgagaagccctctgccatccagcagcgagccattctaccttgtatcaagggttatgatgtgattgctcaagcccaatctgggactgggaaaacggccacatttgccatatcgattctgcagcagattgaattagatctaaaagccacccaggccttggtcctagcacccactcgagaattggctcagcagatacagaaggtggtcatgggcactagggagantacatggggcgcctcctgttcacgcctgttattcgggggcaccaacgtgcgtgnttgaggttgcaggaaattgcagatgggaagttncccacatcntcgtggggtacccntgggcctgtttttttgatatggtttaacccgaganaactttttcccccaa

SEQ ID NO: 667 - DNA, 462 bp, Homo sapiens
  misc_feature (1)..(462): "n" represents an unknown nucleotide
ttttttttttttttttttttttttcttaacacaagtgcntctttaattgctttgacagaacaagggtntaaacagcgttagtctacaggcctaccctttccctttcctcctctgcagctgaggaaatgggcagtcccatcgntagaaccctgttcttagaanttacctggnctcttgctctgacagatgctgagctaatgctgggtcacatatttaacagntagcctaaagccataggtggaaacagagttgggcaagagcctgggctcaggtntagcgaggagtagagagggaagacaaagggantatcagnacccctcacacgggcctctcctccccaaagntggttccacctggggtttntttcagggagttcacttacctttcacgtttcccttnctcccccaccccagttttttccaggggttttanccaaggggtncagagcaagggaagggggtt

SEQ ID NO: 668 - DNA, 423 bp, Homo sapiens
  misc_feature (1)..(423): "n" represents an unknown nucleotide
acccccagggttaaacatgactcccctctgacaataatgggtgacctgtcactgttttttggtatttgatatcttaaccccattctcccagagaatacaattcatggaaatttttacctaacttggcatggggttcatggagctcaggttaggaggcccagaactggagagctaaggcatacttcatcagcttagcacatgacgactgtctctccagactgcgtggagtgcatggcgtgttcagacaacacagttcgtgctggcctgacacccaagttcattgatgtgccaaccctgtgtgaaatgctcagctatacccctagctccagcaaggacaggctctttcttcccaacacggagtcagggaggaccctaacctctcaatctatgganccccctgtaaccagaatttcaaccattttt

SEQ ID NO: 669 - DNA, 423 bp, Homo sapiens
  misc_feature (1)..(423): "n" represents an unknown nucleotide
tttttttttccattcaaaaatgacaaattctttatttaaatcaacaaactcatcttcctcaagccccagaccatggtaggcagccctccctctccatcccctcaccccacccnttagccacagtgaagggaatggaaaatgagaagccacgagggcccctgccagggaaggctgccccagatgtntggtgagcacagtcagtgcagctgtggctngggcagcagctgccacaggcttcctccctataaattaagttcctgcagccacagctgtgggagaagcatacttntagaagcaaggccagtccagcatcagaaggcagaggcagcatcagtgactcccagccatnggaatgaacggaggacacagggnttcagaggacaggaacaggccagggggtagaaggagagacagattaggcca

SEQ ID NO: 670 - DNA, 152 bp, Homo sapiens
  misc_feature (1)..(152): "n" represents an unknown nucleotide
gcaggccccagtaaagaagatccaggnctncaccatngccttcaagcagatngagcagatctctcagttcctgcaagcanctgagcgctatngcattaacaccactnacatcttncaaactntggacctcttggaaggaaagaacatngcct

SEQ ID NO: 671 - DNA, 409 bp, Homo sapiens
  misc_feature (1)..(409): "n" represents an unknown nucleotide
ttttttggaatagttcaggttaatatttactgagaaaaagtcatatatcgaagggaaaatgggagtaagtaagtctgactgccatagtcagacttactatgtgcatggagtagaggggaacttcataatgcatatgttttctggcctgtgaactggagtccctggggtgagtactggagttctaaagacacgtgagctaaccctgctcccctgtgtcttctgaacaagacatggncaaggcagccgatacacacatgtgctttcagggcaacacaanttttaggggtaagtacttttgggggtcacacacctgttattttaatatcctgaccaattgacatacctgatttatcccnttttagntgaggaggggntttttngggggaaatnagggttncacatattttgc

SEQ ID NO: 672 - DNA, 386 bp, Homo sapiens
  misc_feature (1)..(386): "n" represents an unknown nucleotide
ttcttagctgaacaatgaatgctgaccctaaatgtggacatcatgaagcatcaaagcactgtttaactgggagtgatatgatgtgtagggcttttttttgagaatacactatcaaatcagtcttggaatacttgaaaacctcatttaccataaaaatccttctcactaaaatgggataaatcagttatgtcaattgtcaggatatttaaattaacagtgtgtggaccccaaaagtactttacccttaaaacatgtgttggcctggaaggcacatgtgtgttatccgctggcctttgcccatgtctttgttcaggaggncacggggggagcanggggtaggctcacngtgttctttaggggacttccnggtactttacccngggggg

SEQ ID NO: 673 - DNA, 457 bp, Homo sapiens
ttaaaggaagtcaaaaactttattcagcttataaaattccatgttccaagaacatgctctaagcatgcagaaagcacaggacactgctcccgggtgggggctcaggtggggcaacctctgaagctctgctgacccctgggccaaggccctgacagactagcaggcccagtggtcatgaaagcgtgacggccaccacatcacaagcgtgatggcacctgctggtgcagctgcagtccctggtgggccgggcactcactctggcagccgccgtcccccatgccagccatggttgtcccgccatacgcagtaggttgagtgtggtcgcgaaggccagccaggccaggtaggggtagagcaggcgggcggccagcgggctcacctggtaccaggccacggtagtgtgaccggccgccccaactgaccagcaggagattcaccaaggccccgcccatttgtc

SEQ ID NO: 674 - DNA, 121 bp, Homo sapiens
gcagtctgggtgcatggaacaaatttagactaattggccctcgcaatgatcagtcctaggaccctggccttattattagcatggtgctttaaccaattgtacataataataccactgatag

SEQ ID NO: 675 - DNA, 429 bp, Homo sapiens
  misc_feature (1)..(429): "n" represents an unknown nucleotide
ttttcagagttggaattggctcctttatggaaaaactgaaaatataataaaaattaaaataaaaccagttttaaaaaagccagcccctggggtttccacctcctgcctccggcctccagaggggtngaggccccaaccccagggcagcagaaggatgagggcctcctgctcctcctcttcccccattccatccccttcttatctccacagtgggggccccgggagnaaccaaacctgggtgggagggcagggacccaaggccccgtggcccggggaagggggctgggattgcgccagcccgcagcccttggcctgtagtgtgggcatgggcagggccctcctgggcctgggccagtgggggttggggccattagttccagatcttgaggaaggagtcccaggagcccgtggccacagcatgccatcgtc

SEQ ID NO: 676 - DNA, 420 bp, Homo sapiens
  misc_feature (1)..(420): "n" represents an unknown nucleotide
ggcgggataccacctgtgccctgtggacattgagacaggccagcagacagtgggttttgctggacacagtggggatgtgatgtccctgtccctggcccccgatggccgcacgtttgtgtcaggcgcctgtgatgcctctatcaagctgtgggacgtgcgggattccatgtgccgacagaccttcatcggccatgaatccgacatcaatgcagtggctttcttccccaacggctacgctctcaccaccggctctgacgacgccacgtgccgcctcttcgaacctgcgggcccgatcaggaagcctcctnatggtacttcccatgacaacattcatctgtgggnatcacctctggttgccttctcgcgcagaacnggctgctgcttcgctnggctaacgacgaacttcaactgcaacatctg

SEQ ID NO: 677 - DNA, 262 bp, Homo sapiens
tttttttttttttttgcatttcctctacatttattgcaacggctaaatgattaacaacattcacaacttcttagatcttaaaaaacagaaacaaaagaaaacttccattttgtaacatcacaaatgtcttctaggctttatcaaggaccaaaaacactacaattctctaagtgatttccagtgatggaaacaagccagagacagtaaagcacccagagtggcgagagagcacttccagatgcctgttgtcctctcgggggtg

SEQ ID NO: 678 - DNA, 433 bp, Homo sapiens
agttaaatgctttaggaatctgtggcgtgtggccactgaccgccccccacctccagccgctcctccaagtttgagctgagatggttctgtgagtccttggcaggggtcaaagggcacatctccttgaacctagaaagccccctacactctcagaggacacctctcctgtggattcagcgctggggcagtgaaggtgtcgggagccagcagagcatggtgcgtgctgccagctgccggccagccgggatagaggagatgccactggccctccgtgcccccagcccctccctcttaaccgaggctgtccttgctctctgcagaggccgctctgcaggatcctcgtgtcgcgcgtgatgtgtggtggcacagcgtgtcaaagtcacagtgtcttttctgtcgttctagttccagggtcaccccgagaggacaacag

SEQ ID NO: 679 - DNA, 354 bp, Homo sapiens
  misc_feature (1)..(354): "n" represents an unknown nucleotide
acanaantgtgggataatctattttaatgaaactcattatatatatattnncaaaaagantaaaggaaaaagacaaaaacaaaantagatnttacagcttaataaaaagtacaactgagcactgtgggctggaggtgggatacccacccgcagcacgcccaccctaatgtgccatctgagggcctggggaaaggacagtgggaaggagacagtaggctcagcccagagntgcccctgtcctcagggnttcantgtagtttgaccctgacattaaaccttttatgtccttcccagtcaggaaggtggctgggtacaggggtgggggtgaggagcagagagaggtacagggcagga

SEQ ID NO: 680 - DNA, 4804 bp, Homo sapiens
cagaagaacaaatcgtgacatggcttatatctttgggagttttagagtcccctaaaaagaccatctgtgatccggaggagtttttaaagtcctcgctgaaaaatggggtagttctgtgcaaactgatcaacagactcatgcctggctctgtggaaaagttttgtctggatccccaaactgaagctgactgcatcaacaacatcaatgacttcctgaaaggatgtgcaaccctccaagtggaaatatttgatcctgatgacctttattcaggggtcaatttctccaaggtactgagtactcttttagctgtcaacaaagcaacagaagatcagctatcagaaagaccatgtggacgttcctcttctcttagtgctgctaatacttctcagacaaacccacagggagcagtttctagcacagtttcagggctgcaaaggcagtcaaagacagtggagatgacggaaaatggaagtcatcagttgatagtaaaagcaagattcaactttaagcagactaatgaggatgaactgtcagtttgtaagggggacatcatttacgtcacacgagttgaagaaggaggctggtgggaaggcacattaaatgggagaacaggctggttccccagtaattatgtccgtgaaattaaatccagtgagagacctctctccccaaaagccgtcaaaggatttgaaactgctccacttaccaagaattattatactgtggtgttacagaacatcctggacactgaaaaagaatatgctaaagaacttcagtctcttcttgttacttacttaagacccctgcagtccaataacaatctgagtactgtggaggttacatctttactgggaaacttcgaggaagtatgcacatttcaacagacactctgccaagccttggaagaatgttcaaagtttccagaaaaccagcacaaagtaggaggttgtctactgagtctcatgcctcattttaaatctatgtatctggcttactgtgcaaaccatccttcagctgtaaatgtgctcactcagcacagtgatgagttggaacaattcatggaaaatcaaggtgcatcgagcccaggtatcctcattttaacaacaaacctcagcaaaccattcatgcgactggagaaatatgttactctcttgcaagagttagaacggcatatggaggatactcatccagatcatcaggatattctgaaagcaatcgtagcattcaaaactctcatggggcaatgtcaagatctgaggaagagaaaacagctggagttacagatactgtccgaacctattcaggcatgggaaggagaagatattaaaaacttgggaaatgtgatttttatgtcacaagtaatggtgcagtatggagcatgtgaggaaaaagaggagcggtaccttatgttattttcaaatgtcctgataatgttatctgcaagtcctcggatgagtggctttatctatcagggaaaaataccaatagcaggaacggtggtgactagattagatgaaattgaagggaatgactgcacatttgaaatcactggtaacacagtggagagaattgtggtccattgtaacaacaaccaggacttccaggaatggttggagcagctgaacagactgatcagaggacctgcctcttgcagttcattatccaaaacctcatcgtcatcatgtagtgctcattcttcttttagctctaccggacagccccgaggacccttggagcctcctcaaattataaaaccgtggagtttaagttgtctacgacctgcacctccacttagaccatcagcagcactaggttataaagagaggatgtcttatatcttaaaggagtctagtaaaagccctaaaacgatgaagaaatttcttcataaaaggaagactgagagaaaaccatcggaggaggaatatgtgattaggaaaagtacagctgctctggaagaggatgctcaaatccttaaagtgatcgaagcctactgcaccagcgcaaattttcaacaaggccatggctcaagtactcgaaaagattccattccacaagtcctactccctgaggaagagaaactcatcattgaagaaaccagaagcaacggccagaccatcatggaagaaaagagccttgttgatactgtttacgccttgaaggacgaggtcagagaactgaagcaggaaaataaaagaatgaagcaatgcctggaagaagaactgaaatcaagaagggacctagaaaagctggtgcggaggcttttgaagcaaacagatgagtgtattcgaggcgagtccagtagcaagacctcaattcttccataaccatcactgtgccactgggtggagtgtgccttcagggcatcttgaaatgtcccgctgaatgatttgactcagtttgctcacttctttggcttttgttttgtgtttgagtctctctctctctctccctctctcttctctttctctccccgctgtgtgcatatgtgtgtgcgtgcacgtgcgcgcttgggcatttgctgttgtttggttattggttggttgttcattttttttttcaacaggtgaaaaagcaggaagtggtggtagagatggcctcagagtcttttccattcagtaagaaagagaaagggaatgcaggccagttacttaaaaggtcttcagattgccttcagttcacagtgcctctgcaacagccattgccctcaggtcacattctttgggctggctgcccttgcaaagcagctggccaaggcttattaaatgtgaacccaacttttccccagggctttcctgtacctgcaagcctcttagtacttaatttaccgaaggcaaatcttccagactatggcttgagtaggatgaaagacaaacacatctgcccaatgatccagctgcccttccttagaccatcacatgcctcccctcaatcacaggttttaaaattactgccctatgttgtctataagaccaagaaaactgtagtacccttattccttttgtgtcatgtaaattgtaactcaggggggcagaagctctggtcacccacaccaacaccaaatccatcagcaaattctactggacaatcctcccttttagtagcagagttgaccgccttttcccattgcatgataggtttctttccctcattctgcctagtgtgtaagttttctatttccccagtacttttagccaaccttaccaagtggtgtgtaaactagtatgtatgtgctttgcttactttttaaaaaaatgtagttagactgtgaggagttactttatgtacgttgcatattcaaactgtgatgttttatccttcaaaacaatctgcattaagaagatattgtgccctactagacagctttcattcactttattactctctcatatatgctgtgagaagttgtaatattaattggcctctttgggtgggactctaagcagtatttgcagaaatatgcttctggtccaacttgtacatccagaacaaaagggcccctctagtagctgtgtgctggattattcaggactgattaactcaagttgctcattgaatcacatcatccactttatcccagaaactagaactgtgagaaaccaggtttagaagacagtcacagaacagcacacatccaaattcagcgccattgaaagttggcctaaggctcagtgccactcacccctccctccccaaaagacaagagaaatttggccagatggggaaggtcactggaaattgaggccaaagggctgatcagaattgcctttataatatatttgatggatgcctataaatgtgggttttgcaaatattgtttaaaaaccaaacttgaagccaggcatggtggcccacacctgtggtcccagctactcaggaggctgaggtgggaggatcatttgagcccaggaggtcaaggctgcagtgagctgtgatgacaccactgcactccaacctaggtaacagagagacacctctgtctctgaaaaaacaaaacttgaagtttgaaacccccagcttgctgaggagccctttttatttttggtactgagagtctcaaggtcccatagctacatggtacagggctgttgtctgcttgctgcacagcagaaattacaccatccacaggaaatggactatttttgcagtccaacatcagccaaccacacacagccgtgtttggaagctgaagagtaaagaaatttctaggaatggctgttgttctgttttttagcacagccatttagatataacatccttcacttaaaaattaaaaacatcagtactaccaccaccaccaacaacatcaacacagatcttcacatctgcccattctgtggttagtcaatggcttgcaataaatgtgcaaactgcatctataggaaacatttttgtgattacggaatactttagttgattgctgaaaatattgaaaggtcttcattttacagtgatgagtacatatgcatgtttcggggacttggcccttctgatgaggggccctcggtactctggataacgaagcttgtgcagagtggtaaccatgcttacacactaaactataatataaaggaaatgaagccatgttaatctgagagcagtgtcgccatagttgtgttgtttacaatactctataaatgggttcctgttgccctgtaattaaactgctgcccgtagaggcctttcagttccttttctgtccttccccttcttaacacaagctcaaattttctaacttgtttttattttgaagacttttaaaatggacattttcaatacataaaaataaacagtgctttataaaaat

SEQ ID NO: 681 - DNA, 419 bp, Homo sapiens
tataaagcactgtttatttttatgtattgaaaatgtccattttaaaagtcttcaaaataaaaacaagttagaaaatttgagcttgtgttaagaaggggaaggacagaaaaggaactgaaaggcctctacgggcagcagtttaattacagggcaacaggaacccatttatagagtattgtaaacaacacaactatggcgacactgctctcagattaacatggcttcatttcctttatattatagtttagtgtgtaagcatggttaccactctgcacaagcttcgttatccagagtaccgagggcccctcatcagaagggccaaatccccgaaacatgcatatgtactcatcactgtaaaatgaagacctttcaatattttcagcaatcaactaaagtattccgtaatcacaaaaatgttt

SEQ ID NO: 682 - DNA, 426 bp, Homo sapiens
ctttcattcactttattactctctcatatatgctgtgagaagttgtaatattaattggcctctttgggtgggactctaagcagtatttgcagaaatatgcttctggtccaacttgtacatccagaacaaaagggcccctctagtagctgtgtgctggattattcaggactgattaactcaagttgctcattgaatcacatcatccactttatcccagaaactagaactgtgagaaaccaggtttagaagacagtcacagaacagcacacatccaaattcagcgccattgaaagttggcctaaggctcagtgccactcacccctccctccccaaaagacaagagaaatttggccagatggggaaggtcactggaaattgaggccaaagggctgatcagaattgcctttataatatatttgatggatg

SEQ ID NO: 683 - DNA, 350 bp, Homo sapiens
  misc_feature (1)..(350): "n" represents an unknown nucleotide
naatatcttgtttttgatgtgctccttgaccttctacctctttctctggaatgagatcttctccgccttgggcttttggatcgtcgccgactcctagacttagaatgtgaccgccgtctcgntctgcttcttgaccgcctgtgtctagaagatgagggagtcctcctcctcctagaacgtgatcttgatcttgaatgccttctttnttcttctttcttatctggttctatagcagcagaaattagggactgtgcttctcgtactcttttcataggcttcctctatntctttactagagggtatccgatttcagacttnggtgaaacgagaccagcagctaacatgattca

SEQ ID NO: 684 - DNA, 401 bp, Homo sapiens
  misc_feature (1)..(401): "n" represents an unknown nucleotide
aaaatcccatcatgaccctggaagcctttagaacagttttatcctttgaaacacaaggacacatttctcccagtgcgcagaatttcaagtttacgtggttcaagcttaagaagtgtatgtttcaccgttccttagaggacaacagacccaagttatcactatgaggaaaggacagctgtcccagttcaatgggataatccaacaccaccagctacctgtacaacagtaagatggtcaatccctgtctgttacccacagggccagcatgacaaggagagagccccatcttnctttaatagcaaaccaacccctttatncttatctctgctgctaggggtcaagcttggtttttgttgaggttcangttcccagagcccagggtcccatccctggnttttgct

SEQ ID NO: 685 - DNA, 469 bp, Homo sapiens
  misc_feature (1)..(469): "n" represents an unknown nucleotide
atatgaagcacccntatctgctggctaatctcttgctttggatgttgtagggttgaatgcaatgcagttacagaatttggctgcactagctgctgcagctagtcanttcagaacacaccaagtggtaccaatgctctcactacatccagcagtcccctcagcgtgctcactagttcagggtcctcacctagctctagcagcagtaattctgtcaaccccatagcctcacttggagccctgcagacattagctggagcaacggctggcctcaatgttggctctttggcaggaatggctgctttaaatggtggcctggggcagcagtggcctttccaatgggcaccgggagcaccatgggaggcccttcactcaggcctaattcgggtattccaggcaatatgcttgcttgctggcggttcccccacttntgttacaaccaggatttttctggacacaggcaggagttttt

SEQ ID NO: 686 - DNA, 486 bp, Homo sapiens
ttttttttaggcaacaatgtattttataagcactgcagagatttagtaaaaaacatgtatagttactttagaaacaacttctgacacttgagggttacccaatggtctccttcccattctttatatgaggtaaatgcaaaccagggagccaccgaataaacagccctgagtacatttgtaatcttgggctccatgggaatgtccttgattaagatgaaagaggaatggactgatgtttctattacaagatcctataatgctaggacttctacacagcttagaacaatggttggagcttcattctttgagcagaaagactcaaatattatttcagtcacttgtagcaccattggatgtgggtgcacacttggcctaaaataccatttacatcattatcttggtcctgttgaagacctatggcatgcaagaaatttaacattggactcaaaatacatgtagtatgcccagtaaaatacattggctagc

SEQ ID NO: 687 - DNA, 425 bp, Homo sapiens
  misc_feature (1)..(425): "n" represents an unknown nucleotide
acatacgaggggacagggctgaggatgaggagaaccctggggacccagaagaccgtgccttgcctggaagtcctgcctgtagnctgaaggacttgccctaacagagcctcaacaactacctggtgattcctacttcagccccttggtgtgagcagcttctcaacatgaactacagcctccacttggccttcgtgtgtctgagtctcttcactgagaggatgtgcatccaggggagtcagttcaacgtcgaggtcggcagaagtgacaagctttccctgcctggctttgagaacctcacagcaggatataacaaatttctcaggcccaattttggtggagaacccgtacagatagcgctgactctggacattgcaagtatctctagcatttcagagagtaacatggactacacagccaccatntac

SEQ ID NO: 688 - DNA, 472 bp, Homo sapiens
tttttgtagattataaatgtattatttaatcagtttagtatgaaattgccttcccagtacatgattgtgaaaaagacatttagaaaatattctaaaatttaatctgagcctcactttctacaagggaaatcatgatttccgttcataaacagcatgctcatccccctaacaccattcttataagctgggcaccctcattttattttcttcgttggttctaaccctgtggcgtggtatgctgtatagtaaaaaggcagagaaccactttactgaaaaggtactagagccggcagtccagaagttaatgtgctggtcaaagaaccgttctggtaaagaagaggtgagcattgccttcacgtgttacacggttacacaccccttgtagcctcacctcagtgtaatcagtctacttttggtactagcaaagagtacagcaaatggaggattgaggtgtagaaatggtatgttttgg

SEQ ID NO: 689 - DNA, 502 bp, Homo sapiens
gtagcataaggtctggtaactgcagaaacataaccgtgaagctcttcctaccctcctcccccaaaaacccaccaaaattagttttagctgtagatcaagctatttggggtgtttgttagtaaatagggaaaataatctcaaaggagttaaatgtattcttggctaaaggatcagctggttcagtactgtctatcaaaggtagattttacagagaacagaaatcggggaagtggggggaacgcctctgttcagttcattcccagaagtccacaggacgcacagcccaggccacagccagggctccacggggcgcccttgtctcagtcattgctgttgtatgttcgtgctggagttttgttggtgtgaaaatacacttatttcagccaaaacataccatttctacacctcaatcctccatttgctgtactctttgctagtacaaaagtagactgattacactgaggtgaggctacaaggggtgtgtaccgtgtacacgtgaagg

SEQ ID NO: 690 - DNA, 357 bp, Homo sapiens
ggtcaaataaaaaaaaaatcactttagcagcagttcagcaatctctaattgtagggcttgttgtaaacctcactgctctaccttatctgttgttagtgaaaacaaaaatatactggaaattcagtttaaataaagctaggttcagagctgatgccttgaaaaagatatttttgccaacagataaacgcaactcaaatagaatccctaatataagagcatgagaaaaatccttctacaatattttgaaaagtgaaggtaacatcatgaatgctgtgtcagtgcatggcaagttaaactggcaggcaatctccatggccttttaataatgccgtggcaccaacttcgctcggagttctc

SEQ ID NO: 691 - DNA, 323 bp, Homo sapiens
tttacaggaaaccaacttacgagagttatgaactgcctgcccggagccagataggacagaagagtccttcagaaatcagcgttcatgttggaatagatgatacctcaaggaattctcctaaactgggtttgctggaccggattgttaattatagcagagcctctataaactcactactgtctgataaacgctccctaaacagtgttgttaccagtgaacctgacaagcactcactcctggtgggagacttcagggaagatgatgacactgcattataaaaggccatggagagtgctgccagtttaacttgtcatgcactgaca

SEQ ID NO: 692 - DNA, 390 bp, Homo sapiens
tttttatgtagaaaagcaatttattccattttaagcacttacacagttagtcatggagagtaacaggcctgctggtgaaacaggtcacccaaaatggagatggcatcaaactagtggtcaaggactaactcctaaaaaaaaaaagcaactcttatcaaggattaatttaatttttaaaacaaatacaagttattgattcactcttctcaacttgacagtctacctgtggtataactgtcaggtaaaaacatacatctttacaacttggtggtcccaagttaaaaaaaaaaaaaaaaaaaccaacaacaacaaaaaaaaacaccatttcacagacaggaaataaacaacatgaaaacagctcaagaaatacactaacgagcaaaaatatat

SEQ ID NO: 693 - DNA, 459 bp, Homo sapiens
gattctgtatcagaagacaatatcatgcaagtgtggcaaatggcagagaacatttataatgatgaagaccctgaaggaagcgtggatcagaaggacaagggtctagatatgtctttacttgttgtgattttagactccccttttttcttctcaaccctgagagtgatttaacactggttttgagacagactttattcagctatccctctatataataggtaccaccgataatgctattagcccaaaccgtgggtgttttctaaatattaataggggggcttgattcaacaaagccacagacttaacgttgaaattttcttcaggaattttctagtaacccaggtctaaagtagctacagaaaggggaatattatgtgtgattatttttcttcttatgctatatccccaaatttttcagactcatttaagtaaaggctagagtgagtaaggaatagagcc

SEQ ID NO: 694 - DNA, 267 bp, Homo sapiens
ttttttggtcaaaattagtaaactttatttaaacttcaaaaaaataaaataacagacaaaaggcagctttactttgttcttcccgaggatcagctgtaaccactcacagcaggaactacccctaagttaaaataccctttacccgccccgcatcaagccacaggaaggaaggatcttcaatttggggacaggcagggggtgggtggggtaggagtgagaacaccactgggccagtgagttctaacagcacaagtggagaacaagaca

SEQ ID NO: 695 - DNA, 287 bp, Homo sapiens
tgaacttctggatcccgtttctgatgcagactcttgtcttgttctccacttgtgctgttagaactcactggcccagtggtgttctcactcctaccccacccaccccctgcctgtccccaaattgaagatccttccttgcctgtgcttgatgcggggcgggtaaagggtattttaacttaggggtagttcctgctgtgagtggttacagctgatcctcgggaagaacaaagctaaagctgccttttgtctgttattttatttttttgaagtttaaataaagtttacta

SEQ ID NO: 696 - DNA, 277 bp, Homo sapiens
tttatttttatattatttatttattctttgttagtttttggagtgtgggttttgttttgttttttgaattttttattttgttctactcggttttattcttattgctcaggcttgagtgcactggcctcttctcagctcaacctccgcctcttgggttcgggtaatgatggttccacgtcagcggccctccgcctcttgggtttgcgtgacggttccacgtcaccgaccctccgcctcttgggttcgggtgatgatggttccacgtcagcggccctcc

SEQ ID NO: 697 - DNA, 447 bp, Homo sapiens
  misc_feature (1)..(447): "n" represents an unknown nucleotide
cggcacgagggctcactccccttccaccctcagctccaccctcagcagatgataatatcaagacacctgccgagcgtctgcgngggccgcttccaccctcagccgatgataatctcaagacacctcccttagctactcaggaggctgaggcagaaaaaccacgcaaacccaagaggcagagggcggctgagatggaaccacctcccgaacccaagaggcagagggtcggtgacgtggaaccgtcacgcaaacccaagaggcggaggaccgctgacgtggaaccatcatcacccgaacccaagaggcggagggtcggtgatgtggaaccgtcacgcaaacccaagaggcggagggccctgacgtggaaccatcatcacccgaacccaagaggcggagggtcggtgacgtggaaccgtcacgcaaacccaagaggcggagggccgctga

SEQ ID NO: 698 - DNA, 2122 bp, Homo sapiens
gccgcccgactccacggcggctttgactcggactgcagcgaggacggcgaggcgctcaacggcgagccagagctggacctcaccagcaagctggttctagtgagccctacatcagagcagtatgacagcctacttcggcagatgtgggagaggatggacgagggatgcggagagaccatatatgtcattgggcagggatcagatgggactgagtatgggctgagtgaagctgacatggaggcctcctacgccacagtgaagagcatggcggaacagatagaggccgatgtcatccttctgcgggaacggcaagaagctgggggccgcgtgcgtgattacctggtccggaaacgagtaggagacaatgacttcctggaggtcagggtagcagtggtgggcaacgtggatgctggcaaaagcacgcttctgggggtcctgacacatggggagctggacaatggccgaggctttgcccgccagaaactcttccgccacaaacatgaaattgaatctggtcgcaccagcagtgtgggcaacgacattctgggctttgacagtgaaggcaatgtagtgaacaagcctgacagccacggcggcagcctggagtggaccaagatctgtgagaagtccacgaaagtcattaccttcatcgacttggctggtcatgagaagtacctgaaaaccactgtcttcggcatgacaggccatctgcctgacttctgcatgctcatggtgggcagcaatgctggcatcgtggggatgaccaaagaacacctgggcttggcactggcactcaatgtacctgtctttgtggtagtcaccaagattgacatgtgtcctgccaacatcctgcaagaaaccctgaagctgttacagcgcctgctgaagtcaccaggctgccggaagatccccgtgctggtgcagagcaaagatgatgtgattgtcacagcctccaacttcagctctgaaaggatgtgcccgatattccagatctccaacgttacaggcgagaacctagatctgctgaagatgttcctcaacctcctctccccccgcaccagctacagggaggaggagcctgctgagtttcagattgatgacacctactccgtcccgggtgtggggacagtggtttcggggacaacactgagaggcctgatcaagctgaatgacacgctgctgctgggcccagaccccttgggtaacttcctgtccattgctgtcaaatccatccatcgcaagcgcatgcctgtcaaggaggtgcggggtggccagacagcatcctttgcgctgaagaagatcaagcgctcgtccatccggaagggcatggtgatggtttccccacgtttgaatccccaagcctcctgggagtttgaggccgagattctcgtcctccaccaccccaccacaattagcccgcgctaccaggccatggtgcactgtgggagcatcaggcagacagccaccattctgagcatggacaaggactgtctgcgcactggggacaaggccactgtacacttccgcttcatcaagacccctgagtacctgcacatagaccagcggctggtgttccgggaaggccgcaccaaggctgtcggcaccatcaccaagctcctccagaccaccaacaactccccaatgaactccaagccgcagcagattaaaatgcagtcgacgaaaaagggccccctgacgaaacgagacgaggggggcccgtctggtgggccagcagtaggagcacccccacctggagatgaagcctcctctgtaggggcagggcaaccagctgcgtccagcaatctccagcctcagcctaagcccagcagtggaggccggcgacgagggggccagcgccacaaggtgaagtcccagggggcctgtgtgactcctgccagcggctgctgaaccttcccctggcccaccctcaccacccaaggggtcatcatctctggccaccactccaccagatgggcagagcagctatgaccgccacccagccctcccgctcaggccacagccggagcctccgcattgcccccacccccattttccaggggggttgtaatttataagctgacgaaggtagccagacttccggagactgaccatctctcactgt

SEQ ID NO: 699 - DNA, 477 bp, Homo sapiens
ggcgagccagagctggacctcaccagcaagctggttctagtgagccctacatcagagcagtatgacagcctacttcggcagatgtgggagaggatggacgagggatgcggagagaccatatatgtcattgggcagggatcagatgggactgagtatgggctgagtgaagctgacatggaggcctcctacgccacagtgaagagcatggcggaacagatagaggccgatgtcatccttctgcgggaacggcaagaagctgggggccgcgtgcgtgattacctggtccggaaacgagtaggagacaatgacttcctggaggtcaggtgaggaggccgcgggacattttggggtccccattcttcacagaggttggtgactgagcctgtggcacttgggcgtgtcagctccatcctttcccctcctgaggcggggaaaagtgtccaggtgtcttgaaagtgggcccttgccaaattttac

SEQ ID NO: 700 - DNA, 441 bp, Homo sapiens
ggactctgtgtgctgccttaggggttaggaatgtggtgctcttgttgggggaagtgagctccaagagtagctttttttcatctcttagtgatcttctgtttatcggttgaatgccacagattcccttttaaacttattttgctttaaaaaaaaaaaaaaaagaaaaagaaaatttaacttaaaatattttagcattagttgcacaaaatgtttggataaaattctagtttttataagtctttttatatatttagcctgtcacaacagtgctcaagattgtattgaagtttttctgcattatacaaccctaaaacacagagatctcactgacccgttgccctgtaaccactttctttccttcttttgcctaatacagctcagctaagtccttccataaagatgctaaataactttcatcatcacataaatgtcttcataaac

SEQ ID NO: 701 - DNA, 493 bp, Homo sapiens
ttttttacaggtacacaatttaatatttattatatgcattttatatacattatttttcaacagctgtatgtttgctatgtggtacaatcttaaaaatttgctgattcatagtttgtaaaacaaaaaccttacaaaactcatcaaaactcgcaaactgatcagaaaagtttctcggaagactagaaaaaatactttattgtcttaatcatgcattacacaaacaaaatctttagttacaccataaaattaagcacatctaaaaaaataaaacagggataactagtcaaaacacagcagatttctgtatcctgattcaactatttttgtatcctatttgtaatgcaaataaaactttactccaaatatttttaaacaagttagttttgtttggaatcatggtaaaccaagatatatatcttagggggaacaccttggtttgtaatttaaactataaaatactccatttttagtctattttagactattcaaagag

SEQ ID NO: 702 - DNA, 292 bp, Homo sapiens
  misc_feature (1)..(292): "n" represents an unknown nucleotide
ttntttttcagggaggagaccacttttattgcttgtctgggtggatggggcaggaggggctgagggcctntcccagacaataaaggtgccctcagcggatgtgggccatntcaccaaggaagggggtcttcatgcagccggtgcagagctgggtccatccagaggggtgcctcgtgctgcagcggcntacggcntgggtagaaggtgaagtccacgcggtagttgagcaggcagctgagggaggccatttagaggtcagagaagcgcacgaggccctttnagaantaggtgg

SEQ ID NO: 703 - DNA, 508 bp, Homo sapiens
  misc_feature (1)..(508): "n" represents an unknown nucleotide
aggtcacggctttgantacgactacaccctggcccagtatgcagacgcactgcaccccgagatcttcagtaccgcccgtgacatcctgatcgagcactacaagtacccagaagggattcggaagtatgactacaaccccagctttgccatccgtggcctccactatgacattcagaagagccttctgatgaagattgacgccttccactacgtgcagctggggacagcctacaggggcctccagcctgtgccagacgaggaggtgattgagctgtatgggggtacccagcacatcccactataccagatgagtggcttctatggcaagggtccctccattaagcagttcatggacatcttctcgctaccggagatggctctgctgtcctgtgtggtggactactttctggggccacagctgggagtttgnaccaaggcacatttttacaagggacgtgacggacggccatccgagacgtgcatgttgaaggggctnatgttaccagtt

SEQ ID NO: 704 - DNA, 524 bp, Homo sapiens
  misc_feature (1)..(524): "n" represents an unknown nucleotide
tttttttttggactagaaggatccatcactttattttcagaaaaagatggccaaagangttnnnnnnnnnnnnnnnnnnnnnnnnnnnnnnnnnnnnnnnnnnttccatccaaaaagctgaatcaaaaacaatgccaatcagctttcacgcccacacaggtgaggtttcactgtgcaacagcacataaatgataatctaaatcctagagagaaaagtaggatagacaccttgtcttttccttggncaggtgggatggcacaggcttggnagacttccatgtcatctccgcttttcctcctctaacacagggctggttggtttcacctgcagggcactactgacttcagggcttgctgggagagggagatggttgtgctgcagttcacttgggtgactattaaacactttgatatgcttnggcagttcccccangtcttccaggcgggaantcaggtcccccccganttcccacnggggccattttgcaggcacagacaacntaacngcacnttattccttgagg

SEQ ID NO: 705 - DNA, 464 bp, Homo sapiens
  misc_feature (1)..(464): "n" represents an unknown nucleotide
acttcttgggaacatttgaccaaaaataatcctcatttcatcttgtgtacagtcctttgtgtaccccgcccaggttgagaggtgaatcagcgtaattctccgaagctctgctggngcagctcagccatgttacattgtctatgcagaataagcaggcctggtgtctgcaaatgtaccagtccttctcccgcatctcctgggtgcccccttggctttgctnctcctgtgtcctgtctttctgcgttttagaagtgagagcctctccttcaccttttgagcaactgagtcatctcaagtcctgagctctgctctggccgcctgctgggtgccttgtaaaggtatactcgttacagggccctagaggttctaatgggtccagggttaagtgagagggagantgtaantttgttttcaaaggatnccttcaccctgatcttgcagtgaggtgganagatcaccgggga

SEQ ID NO: 706 - DNA, 426 bp, Homo sapiens
  misc_feature (1)..(426): "n" represents an unknown nucleotide
tagggctgttgggctgatatatatttgggggtcccacctccccgcctcatccgtacaccaccagggtgaacaggaggaagcaaaggaagtgcagggcccatagcaaagtttcataatcttgaatgcaagaggggagaaggaatggaagggggaaaaaaaaggagaaaatacaaatcctataatacatacaacagggtggggatggtataggaatgggacagacatgaagctgaggcatggggtgggccgctgggggtggggggcagcggaaaccccccacattcctttctctttgatgctgtttccatagtttccaggcttgagaagccctcttcagaagatggggacccggagaagagggtcagggnctcagttgggcccccaagctgtagctgttgtaggcagacttgtttgggtctgggggct

SEQ ID NO: 707 - DNA, 456 bp, Homo sapiens
  misc_feature (1)..(456): "n" represents an unknown nucleotide
gagcatcccccctctcaatgaaacggtatctgcagcttccttactgacgacaaccaatcagcattcatcctccttgggtggcttgagcnagctgaggagattccaaatactaccaccacacaacacagcagcacgttatctacgcagcagaataccctttcatcatcaacatcttctgggcgcacttcgacatccactcttttgcacacaagtgtggagagtgaggcgaatctccattcttcctccagcactttttccaccacatccagcacagtctctgcanctcccccagtggtcagtgtctcctccagtctcaatagtggcagtagctngggcctcagccttaggcagcaactccactgtcacagcctcgactcgaagcttcagttggttacgacttcaggaaaagctcctcccaacctccctcctgggggtcccgccgttgttggntaattt

SEQ ID NO: 708 - DNA, 520 bp, Homo sapiens
  misc_feature (1)..(520): "n" represents an unknown nucleotide
ttttaaccgagaaaactaaaagggagttggtgaaagacatctttggactgcttctctcagttcctgctgtcagacaatctgaagtacttttaagtgtaacctgctcactaaccctcagcctgacacccagctatgtgtcgttgtcttgacactgtgtgggaagctttggttgggcaacacattgtcaaagttaaaatccaatgtatctccatccatgaggtcattccgaatgatggattccatgtcacagtctaagcgctcaatgaacatgccatccaagtcacttgggagcttctcctggtggagaaggcccattctgccatagccattgcagctgctcacggaggaagtagccccccagggacntccatctgcatggggtggggcagaaggcactttgtacaggngtcttcacctngggtcaggcggttcatacccgangtnttggggcatgggggcttaccgtttggggaaggganccccgttnantgcanatgtttgctgaacatttccanggggg

SEQ ID NO: 709 - DNA, 484 bp, Homo sapiens
  misc_feature (1)..(484): "n" represents an unknown nucleotide
ctgtttcgacccagtcctcacctggcaccatgatgcagcagacgccgtgctactcgtttgcgccaccaaacaccagtttgaattcacccagcccaaactaccaaaaatatacatatggccaatccagcatgagccctttgccccagatgcctatacaaacacttcaggacaataagtcgagttatggaggtatgagtcagtataactgtgcgcctggactcttgaaggagttgctgacttctgactctcctccccataatgacattatgacaccagttgatcctggggtagcccagcccaacagccgggttctgggccagaacgtcatgatgggccctaattcggtcatgtcaacctatggcagccaggcatctcataacaaaatgatgaatcccagcttccatacccaccctggacatgctcagcagacatctgcagttaacgggngtccctgcncacacggtaagcaccatgccccanacca

SEQ ID NO: 710 - DNA, 344 bp, Homo sapiens
  misc_feature (1)..(344): "n" represents an unknown nucleotide
ttttcaagctgaagttttatttaaaatgtaaaagaaatgttcccccaaaatgctggtgaataaagcaaaaggataccatacagtgctctcttcctacgagttagccagcctatccaagtacagggcgatatacagtacttaatgctggtagantttcacagtagtttagtgttaaagattatctgtgcctagattatgaagagattctcagtgtgtgatgtttagttcagggtttacatcttactggggcatgaacaagaggcccctgctccttgggcccataggccaaatcccctntcggtgccccgaattnccctgcaacccnggggggatcccncctaggg

SEQ ID NO: 711 - DNA, 477 bp, Homo sapiens
tttttcagaggaagaacagcgaggggcatttaatcttagaacttaagaggtctcagagacaaaggctttggaagaaaggcgtgggcattcctgaggctttactttccccggaaaattactgcaccataatttgtgagtttatttcttccaactaagaaatagaggcaagaaagagggagtaacccgaagtgaagggctctaggatccagggaccaccagccagctcaagttggatttcagcagtcggggctgcctggggcgtgcaaaagctgctgtgtgagcaaaacgctgccgtgaagacattccaggcggcttccaggaagcggctgtatgtgctgacacgcatgtggacaggcagtctggctggccacctctcaagactggtgtttcctagagctttccattggcaaatgctgcctcctggaactgagggacaaaggttttgaaataagcctttgctcctttggccatttcatt

SEQ ID NO: 712 - DNA, 418 bp, Homo sapiens
agagagtatattgctgcttttctcagtcactttggcacaggtgtcgtggaatatgatgcagaaggctttacaaaactcactctgctgctgatgtggaaagatttttgttttcttgtacacattgacctgcctctgtttttccctcgagaccagccaactctcacatttcagtccgtttatcactttaccaacagtggacagctttactcccaggcccaaaaaaattatccgtacagccccagatgggatggaaatgaaatggccaaaagagcaaaggcttatttcaaaacctttgtccctcagttccaggaggcagcatttgccaatggaaagctctaggaaacaccagtcttgagaggtggccagccagactgcctgtccacatgcgtgtcagcacatacagccgcttcctggaagc

SEQ ID NO: 713 - DNA, 215 bp, Homo sapiens
gctgggatgcgttgggggaggaggcgcctgctgccagctttcctctggtacccgctgtgggggtggcatccagggttgggtgcccggcttgacaggtacgttagttttgacacgccggaccaaagggactgtgacccggggtcgcttcacagggaccgccctgggcactggcacgggcgacagacggccccggtagtcgaagagcctgtcgtaga

SEQ ID NO: 714 - DNA, 406 bp, Homo sapiens
  misc_feature (1)..(406): "n" represents an unknown nucleotide
ccagcgctcttcccgccgcagccgcccttttcctccctcccttacgtccccgagtgcggcagtaccgcctccttcccagccgcgcggcttcctccagacctctcggcgcgggtgagcctattcccagaggcaggtggtgctgaccctgtaacccaaaggaggaaacagctggctaagctcatcattgttactggtgggcaccatgtccttgaagcttcaggcaagcaatgtaaccaacaagaatgaccccaagtccatcaactctcgagtcttcattggaaacctcaacacgaggcntggtgaagaaatcagatgtggagacatcttctctaagtatggccgtgtgcgggcatgttctgtgcacaagggctatgcgtttgttcagtactccaatgagcgcgatgcc

SEQ ID NO: 715 - DNA, 3244 bp, Homo sapiens
ccggccgcgagccccgggggccccgaggccgcagcttgcctgcgcgctctgagccttcgcaactcgcgagcaaagtttggtggaggcaacgccaagcctgagtcctttcttcctctcgttccccaaatccgagggcagcccgcgggcgtcatgcccgcgctcctccgcagcctggggtacgcgtgaagcccgggaggcttggcgccggcgaagacccaaggaccactcttctgcgtttggagttgctccccccaaccccgggctcgtcgctttctccatcccgacccacgcggggcgcggggacaacacaggtcgcggaggagcgttgccattcaagtgactgcagcagcagcggcagcgcctcggttcctgagcccaccgcaggctgaaggcattgcgcgtagtccatgcccgtagaggaagtgtgcagatgggattaacgtccacatggagatatggaagaggaccggggattggtaccgtaaccatggtcagctggggtcgtttcatctgcctggtcgtggtcaccatggcaaccttgtccctggcccggccctccttcagtttagttgaggataccacattagagccagaagagccaccaaccaaataccaaatctctcaaccagaagtgtacgtggctgcgccaggggagtcgctagaggtgcgctgcctgttgaaagatgccgccgtgatcagttggactaaggatggggtgcacttggggcccaacaataggacagtgcttattggggagtacttgcagataaagggcgccacgcctagagactccggcctctatgcttgtactgccagtaggactgtagacagtgaaacttggtacttcatggtgaatgtcacagatgccatctcatccggagatgatgaggatgacaccgatggtgcggaagattttgtcagtgagaacagtaacaacaagagagcaccatactggaccaacacagaaaagatggaaaagcggctccatgctgtgcctgcggccaacactgtcaagtttcgctgcccagccggggggaacccaatgccaaccatgcggtggctgaaaaacgggaaggagtttaagcaggagcatcgcattggaggctacaaggtacgaaaccagcactggagcctcattatggaaagtgtggtcccatctgacaagggaaattatacctgtgtggtggagaatgaatacgggtccatcaatcacacgtaccacctggatgttgtggagcgatcgcctcaccggcccatcctccaagccggactgccggcaaatgcctccacagtggtcggaggagacgtagagtttgtctgcaaggtttacagtgatgcccagccccacatccagtggatcaagcacgtggaaaagaacggcagtaaatacgggcccgacgggctgccctacctcaaggttctcaaggtttcggctgagtccagctcctccatgaactccaacaccccgctggtgaggataacaacacgcctctcttcaacggcagacacccccatgctggcaggggtctccgagtatgaacttccagaggacccaaaatgggagtttccaagagataagctgacactgggcaagcccctgggagaaggttgctttgggcaagtggtcatggcggaagcagtgggaattgacaaagacaagcccaaggaggcggtcaccgtggccgtgaagatgttgaaagatgatgccacagagaaagacctttctgatctggtgtcagagatggagatgatgaagatgattgggaaacacaagaatatcataaatcttcttggagcctgcacacaggatgggcctctctatgtcatagttgagtatgcctctaaaggcaacctccgagaatacctccgagcccggaggccacccgggatggagtactcctatgacattaaccgtgttcctgaggagcagatgaccttcaaggacttggtgtcatgcacctaccagctggccagaggcatggagtacttggcttcccaaaaatgtattcatcgagatttagcagccagaaatgttttggtaacagaaaacaatgtgatgaaaatagcagactttggactcgccagagatatcaacaatatagactattacaaaaagaccaccaatgggcggcttccagtcaagtggatggctccagaagccctgtttgatagagtatacactcatcagagtgatgtctggtccttcggggtgttaatgtgggagatcttcactttagggggctcgccctacccagggattcccgtggaggaactttttaagctgctgaaggaaggacacagaatggataagccagccaactgcaccaacgaactgtacatgatgatgagggactgttggcatgcagtgccctcccagagaccaacgttcaagcagttggtagaagacttggatcgaattctcactctcacaaccaatgaggaatacttggacctcagccaacctctcgaacagtattcacctagttaccctgacacaagaagttcttgttcttcaggagatgattctgttttttctccagaccccatgccttacgaaccatgccttcctcagtatccacacataaacggcagtgttaaaacatgaatgactgtgtctgcctgtccccaaacaggacagcactgggaacctagctacactgagcagggagaccatgcctcccagagcttgttgtctccacttgtatatatggatcagaggagtaaataattggaaaagtaatcagcatatgtgtaaagatttatacagttgaaaacttgtaatcttccccaggaggagaagaaggtttctggagcagtggactgccacaagccaccatgtaacccctctcacctgccgtgcgttctggctgtggaccagtaggactcaaggtggacgtgcgttctgccttccttgttaattttgtaataattggagaagatttatgtcagcacacacttacagagcacaaatgcagtatataggtgctggatgtatgtaaatatattcaaattatgtataaatatatattatatatttacaaggagttattttttgtattgattttaaatggatgtcccaatgcacctagaaaattggtctctctttttttaatagctatttgctaaatgctgttcttacacataatttcttaattttcaccgagcagaggtggaaaaatacttttgctttcagggaaaatggtataacgttaatttattaataaattggtaatatacaaaacaa

SEQ ID NO: 716 - DNA, 514 bp, Homo sapiens
ttttgtatattaccaatttattaataaattaacgttataccattttccctgaaagcaaaagtatttttccacctctgctcggtgaaaattaagaaattatgtgtaagaacagcatttagcaaatagctattaaaaaaagagagaccaattttctaggtgcattgggacatccatttaaaatcaatacaaaaaataactccttgtaaatatataatatatatttatacataatttgaatatatttacatacatccagcacctatatactgcatttgtgctctgtaagtgtgtgctgacataaatcttctccaattattacaaaattaacaaggaaggcagaacgcacgtccaccttgagtcctactggtccacagccagtacgcacggcaggtgagaggggttacatggtggcttgtggcagtccactgctccagaaaccttcttctcctcctggggaagattacaagttttcaactggtataatctttacacatatgcggattacttttcgaat

SEQ ID NO: 717 - DNA, 467 bp, Homo sapiens
cccaagtcggaggaagtgtcaccctggggtgatccagagggctttttgcagcaccagcactggatgccttggggagcagaggacactttctgaatctcgaaccttcaaaactttgaaacttaaccgatattttcctgaagtttcctttaacagtgcattatggatttaacatacatgagtatgtctaagccttttttgaacctgtttacattttcaactcggagagcttctgagagtaatcagttacatctgttaaattacccactgaatgaagaagtattccccttcaattatccccgaaactacaatagtaaaatgtaattcagaaaataaatattcatagtctcaactacttaaagggggtctggggaccacaacatgttaccggttttcattttgctggggctcgcatttgaagcaagggctctagtgaggaggtggtgtagactcagcgggttatttaggtc

SEQ ID NO: 718 - DNA, 377 bp, Homo sapiens
  misc_feature (1)..(377): "n" represents an unknown nucleotide
gcagaggaaatctcatttactagcaaataaattaaatacttagggataagcttagcaagaaatgcacaaaacctaaggataattttaaaacactgctaaaaggcacaaaatagacttgaataaatggaaatacatctccttttcttggataggatgacaccacattttaaagatgttagttctctctaaatcagttaatatcatataatatcaataaaataccaatgtaccttaaaaaatgaatttagacaagttgatactaaagttcacatggaaaaacaaacatgtatgaatagccagaagcacaataggaaaaattataagggggactagccttgccagttgttaaaacatactataaagtcncctataattaa

SEQ ID NO: 719 - DNA, 321 bp, Homo sapiens
  misc_feature (1)..(321): "n" represents an unknown nucleotide
ttattgtaaagacgtgcattttatagaatccaagcnaaagctcaccagccagagnnaaagtgaggccagctcagggaatgtgagcagtggcgatttattccctctggtgttccatgttagcctgacacagagccccctcttcacattctcaggggctcttgatccaaaaccttttttaaaaaaaataattttagacttaacagaaaatctgcaaaaatagatttcctgtgtgcccttctctcagcttctnnctaatgttaaacttacataccaatgggtacaattattgaaactaggaaattaacattgggcacaatccga

SEQ ID NO: 720 - DNA, 268 bp, Homo sapiens
  misc_feature (1)..(268): "n" represents an unknown nucleotide
ccagagatncaaaanntttattgaagcttacaatttcactggacttttggccccaaatgaaaaaaaaatgcaaattaaaaaaagtattggcagggagaggtgaccactgtctcctggagactgaagccgagcagagcatggcaggcaagtgaggggtcccagctgcagagggcagaagcctgggccaaagntgcccaggggagcagntttgtctgaggcagggccagccccaggcaggctaggaagttaacacacaaggntttntggg

SEQ ID NO: 721 - DNA, 293 bp, Homo sapiens
gcccgctactgcccacgctctgccaatcctgccatgcagcttgaccgcttcatccaggtgtgcacccagctgcaggtgctgacagaggccttccgggagaaggacacagctgtacaaggcaacatccggctcagcttcgaggacttcgtcaccatgacagcttctcggatgctatgacccaaccatctgtgggagagtgggagtgcaccaggggacctttcctggggttcttaggagtgaggagaagtatgtgggacatctcttcttttcctgttccctctaggaaggaacat

SEQ ID NO: 722 - DNA, 716 bp, Homo sapiens
  misc_feature (1)..(716): "n" represents an unknown nucleotide
tccagtgccaagcacacactaatatgagaangagagtagtgaggaccatgaccagcacagggacaagaactgcagccagcgctacatctttggttacatttggagttacggtagtatttctgatatcaggactggcagttgtttgttctgtctgtgcaggaaattcattgctactgcgaggttgtagtggttgcgtaaattttggggcacgacctttggctatttttggaggggctgtagtgtttttgaggtcattgctgttccgaggaggtggaggttgagtaagttttggaggatgacctttaggaataaacttgacatccngagcagctccattttcatggcaattttctgctgccattgggtaggattcactctaataaaacgtgcaataattggtggcaaaaagttattacgcacatcctggtgataatcnttgtttccctgaaatatcntatcntgctccacancaggctctctgtacacagtccatttctgcccatcatcactggtacaggattctgtaggcagacacatattgggtaggattcactctaataaaacgtgcaataattggtggcaaaaagttattacgcacatcctggtgataatcnttgtttccctgaaatatcntatcntgctccacancaggctctctgtacacagtccatttctgcccatcatcactggtacaggattctgtaggcagacacata

SEQ ID NO: 723 - DNA, 421 bp, Homo sapiens
  misc_feature (1)..(421): "n" represents an unknown nucleotide
gtggacacntgttactaggccctgagagtgganccttacatccataaactacccacagacctatcccaacagcactgtttgtgaatgggagatccgtgtaaagatgggagagagagttcgcatcaaatttggtgactttgacattgaagattctgattcttgtcactttaattacttgagaatttataatggaattggagtcagcagaactgaaataggcaaatactgtggtctggggttgcaaatgaaccattcaattgaatcaaaaggcaatgaaatcacattgctgttcatgagtggaatccatgtttctggacgcggatttttggcctcatactctgttatagataaacaagatctaattacttgtttggacactgcatccaattttttggaacctggagttccagtaagtactgcc

SEQ ID NO: 724 - DNA, 330 bp, Homo sapiens
tttttcgcagcacggacgcactttatttatatgtgtacatatgtatacggaggctgtacagcgcggggccgatgacccccttggctatggtcccgggggtgcgggactggacactccttttttggtcaggcctgctgggggcacagcttcagcagggcaccgggaggtcagccccacttgaggcttggtgcccgagcccaagagggatgcgggtgggactggggtcactgcactgctgggtgcactgcacttcgctggggctagggagggtgtctggggctccggggagagctttggggaggcgggcttggagcgaggaccgctcagcgt

SEQ ID NO: 725 - DNA, 359 bp, Homo sapiens
gcgctgggtgttggaggtggtggaggagcgcaccacgctgaggcggtcctcgctccaagcccgcctccccaaagctctccccggagccccagacaccctccctagccccagcgaagtgcagtgcacccagcagtgcagtgaccccagtcccacccgcatccctcttgggctcgggcaccaagcctcaagtggggctgacctcccggtgccctgctgaagctgtgccccagcaggcctgaccaaaaaaggagtgtccagtcccgcacccccgggaccatagccaagggggtcatcggcccgcgctgtacagcctccgtatacatatgtacacatataaataaagtgcgtccgtgctgcga

SEQ ID NO: 726 - DNA, 525 bp, Homo sapiens
  misc_feature (1)..(525): "n" represents an unknown nucleotide
gagtttaatattaatgaatcaacaatgatattaaataaggtacctttaaaaagaaacacacatacatcatggttatgtattgatcagttgacaaagatgttgtgaccagagatttttcaggaacctaatcctgtatttccagtaagagcaatggctcactattccagtaattcagtgtttgcagtgactttatagaacataattgcctcagaaaaatggaatgccactgtatttgttattttatgtaatcctccaaacagccacggaaataaatattattgtttccattttacagaggtgacaattgaggcagaaggaaatgggctttcctaagggtcaccctgcccaaaagtgggattaaactgatctgcctgtagtgtttggcatccttccccctgcacngggcttgctgtttgaggggctacttcccagagggctggtgtgggtttcacttcntatgaggcgggtgtgtgagcaggnccagaggacttgnggtacaggcttgttcttnccttttgggggaac

SEQ ID NO: 727 - DNA, 111 bp, Homo sapiens
cggaaagctgaggtgggagagtcacttcagcctgggagatcaagactgcagtgagcagtgatgaaactactgcactccagcctgggtttcagagcaagtccctgtctcaga

SEQ ID NO: 728 - DNA, 447 bp, Homo sapiens
  misc_feature (1)..(447): "n" represents an unknown nucleotide
aacagggcggctttttgttttatttctgtttttttccctttttcttaaaaaaattaaataaagttctcattatttccccaatatacatcaaatgagttttcatgcaaagcagcagtcacagaggcagaactgtccccagctcgtgcctctcggcttgaagaaccaccttctcccggccccgggttctctggtgttctcactgaggatggacgacgcccactgtctctcccagctggaactggctatgacgaaacttggctggcgtagggagaggagtcctcccctctccccaggatgggtctcaggggacagcaagctctggggctgatcnccatcattgtccttccatctgagatcccagtgtgacanttggaaagtcctcttcccaggaatgcgaggtccnctctcagtctcaatggaatgggataatgagtgtncacctataag

SEQ ID NO: 729 - DNA, 491 bp, Homo sapiens
  misc_feature (1)..(491): "n" represents an unknown nucleotide
gcaggcagacaggcacagcatccatgacacagatgtgcggcacacctggaaaagcaactgcctccctctgcgcttctgggtgaacgtgattaagaacccccagttcgtgtttgacatccacaagggcagcatcacggacgcctgcctctctgtggtggcccagaccttcatggactcttgttcaacgtcagagcaccggctgggcaaggactccccctccaacaagctgctctatgccaaggacatccccagctacaagagctgggtggagagatactacgcagacatcgccaaagctcccagccatcagtgaccaggacatgaatgcctacctncgcccgaacaggatgagcaggcacggcgggcagggcttggcttataaaggtggagcagctcattaatgccatgtccattgagaacttgagaggaggagcctcgcattccttgggaagagggacctgttcaagctgtcaaacttgggagtcttcaga

SEQ ID NO: 730 - DNA, 392 bp, Homo sapiens
  misc_feature (1)..(392): "n" represents an unknown nucleotide
gagccacatggtgctgcaactgaggttcataaacactaagaagcaggaggagaaaagatataatcacgttccagatttaaaatgccagaaaatcttacaacattcaggagcaaatgtgtcaacaaccaatactaagattttcaaagtgaagagcatttaagtttcagttcatatttaaatagtaaatgaatagctttcccccaatcatctctttatatttaaaaaaaaatcaaataacagtctccactaaaactgtggtacgtgtggcattaaaactgtattcattacaaatggccttaaaactggtatatatggtacattaaaaaacggcattaaggttacnatgggatggaaacggtaacacaggcnacaaatgggcntaggaatggggg

SEQ ID NO: 731 - DNA, 374 bp, Homo sapiens
  misc_feature (1)..(374): "n" represents an unknown nucleotide
tagtataccctcttttctcagctccccatcagcccagagccattgataaattatcacatcactggttttcagaattatttttttgaagtatagaatcacttatttcaaacaaaattgagtatacaaaacagataaatatgggtgggttttctaattaaagttggagtgggaggctagtgacctgcctgctctaaacccctttacctcctactcaggtccctgaaacacaaggaaaatgccaaaattaaagaaatgcttttttcaaatgaaatatcgggcaataganaatgagagacaaaatgcctaacttaggtcttttgtcttgtgaatcccagagaaatttncattttatttattatgatagtaattgnagg

SEQ ID NO: 732 - DNA, 466 bp, Homo sapiens
  misc_feature (1)..(466): "n" represents an unknown nucleotide
taagttcagttctcccttatggctgcctttcaaacaagtaccttttatctgatgcctgtatcttccctttgttaaggtgtaacttgatgtagggtcaaggtttttgtgacaacaggcagactccacacagagaggatatgatgagaatatggccatcacctgaaaagttttcttatcttctgtgcttttggtccctggaaacaaatccgcctatgtatgaagctagttgatttccagttgcactatttccagttgcctctgaagttcacaggcaatacattgtctagtcctttgcgaatttctctgatttgtggggcacagttatgaagtttccccacatgtgaagacagggtacaaaatagcagagccaaggcaggacagtggggtctattccttccattagctcagtggacttgtcccacaatncgtcttaggcacttaccgtttccaaaggttgtcacaaccc

SEQ ID NO: 733 - DNA, 408 bp, Homo sapiens
  misc_feature (1)..(408): "n" represents an unknown nucleotide
actcaccattacattctatttaattgctttgagccagacaggctgttttctttaccatgaaatatactaatcattcaaaaaagccttgtgtttaagaagacagcaaaaaacatcacttcaaaaaggcaactttttttttttcttggcatcaatgaatatgcacttcagaaatctacagagaacttttttcactttgtatttgttccacagcattctagccaggagtacaaaataggagctcttcaagcagcacatgaagatggcccaggagccttcagccatccagagcagcagagcagcacctaaatctccacacacttcccagtatnaaccactaaggancacactagacccttgggcattaggggnttttatcatttcccgttctattatnctggggaatggact

SEQ ID NO: 734 - DNA, 333 bp, Homo sapiens
ctttgacttgctttattgagcctgtgcaggaacagggagtgagcttcggccagagccaacagtgtggaggggagagctgggctggcactgccgtggagtggtagggggcgggaggtagtgttacaagtccagcgggctgagctctctgggggcagcagcatgggaagaccccactctgagaaggccagcgtgtcctctttgtctctttctccatacctggaagcactgtgcccagggtgccagcccaccggtttcatatccgcctgtaggcaccctcttgcccagggcacatgggcccagggctgggtcagcacagatgctctgtttccccaa

SEQ ID NO: 735 - DNA, 443 bp, Homo sapiens
  misc_feature (1)..(443): "n" represents an unknown nucleotide
gtacccaggggacaataccacaccggagcagatggcccagtacacagctgagctccgtagatacatcaacatgctgaccaagcctaggcatgtgccatggacaaggagagagatcccagcccctgggaccctgggcccactccacattcctggccacaccctatccccagcccaagccccatctccagccccagtcccagccccttccaggccactcttggggaaacagagcatctgtgctgaccaggcctgggcccatgtgccctgggcaagagggtgcctacaggcggatatgaaaccggtgggctggcacctggggcacagtgctttccaggtatggagaaagagacaaagaggacacgctggccttcttcagagtgggggtcttcccatgcttgttgcccccagagagttcagcccgttggaatttnttaacattactt

SEQ ID NO: 736 - DNA, 434 bp, Homo sapiens
  misc_feature (1)..(434): "n" represents an unknown nucleotide
gcatttcaatttttatttgttgccattgggtcacttttttggaccataagtcattcccagagctttctctgaatccatgaatgaaggacaaaagtatacatcccatcgctggtatacaacaataactttgaccacatgataggagaagtgagaaatgtagccaattttttcctgtagtttccatgtaaacatatggcagtttacacagaaactacagaaagtacagaaacctaaaatgaaaactaaaatttgttcccaggttgaaaagaggaaagagtttcagtgatagccactaaagccacagaagactttattctctgggaagatgtttttgctaattataaggctgaaatttactgggcacagactttttttgcaattggctgatataatataataaaacaatggtgtcgagcggaaccnctgtgaaagtt

SEQ ID NO: 737 - DNA, 261 bp, Homo sapiens
  misc_feature (1)..(261): "n" represents an unknown nucleotide
gtttgaaggtgtgaaaaggacattgatgantgtgcctctgatccgtgtgtcaatggaggtctgtgccaggacttactcaacaaattccagtgcctctgtgatgttgcctttgctggcgagcgctgcgaggtggacttggcagatgacttgatctccgacattttcaccactattggctcagtgactgtcngccttgttactgatcctcttgctggccattgttgcttctgttgtcacctccaacaaaaagggggaactccg

SEQ ID NO: 738 - DNA, 255 bp, Homo sapiens
  misc_feature (1)..(255): "n" represents an unknown nucleotide
ttattttgatgggnatgtaaaataagatattagactgttttttgaataaaatatttttattgattgaacctttgaccctctatcttattacatttagaggcctggcatctttcttgtgagacaagcttaaggacacaaaagaaacacaactttgtgataccactcttctgaaggctacttatagtaataacttcatagatgaacagcatgattcaggtacagtggctttaaacatcaaagcacatttctcattat

SEQ ID NO: 739 - DNA, 298 bp, Homo sapiens
  misc_feature (1)..(298): "n" represents an unknown nucleotide
ggagccacccngttttaatttatataatgagaaatgtgctttgatgtttaaagccactgtacctgaatcatgctgttcatctatgaagttattactataagtagccttcagaagagtggtatcacaaagttgtgtttcttttgtgtccttaagcttgtctcacaagaaagatgccaggcctctaaatgtaataagatagagggtcaaaggttcaatcaataaaaatattttattcaaaaaacagtctaatatcttattttacatgatttcaaaataaagttgattgtagtacaaaaaa

SEQ ID NO: 740 - DNA, 442 bp, Homo sapiens
  misc_feature (1)..(442): "n" represents an unknown nucleotide
gtgcgtgtagtgttgtcatgacatctcctaaggaactggggggcacgtttgacactcatgaggtcagaacaggtctggtgggcggggggggggggggggncccagggtggtgaatacccacagcanacccccccaccaaaagagaaaacggggagaggagcctggcaggccagactntgatccccatggtccacanagggaaacccccaacagcggcctcggcccaccgnggcagagcagggngntggcaggcctggncacctcccattgcccgatcagcctgntttagggtntnatntggccccttttnanaacttnanaactttgggatggggggtgaattttaaaaaaaggcggggggggtttcaggagggtnagcggtnagtttcacggggnccacnagacaccacaattnagtgggggaaagggtttnttttacagg

SEQ ID NO: 741 - DNA, 569 bp, Homo sapiens
  misc_feature (1)..(569): "n" represents an unknown nucleotide
gccgncaccgccaaaaaagtcaccgccgctagggtcgccgttgcatcggtgcagggcaagatggcatccgccacagactcgcgctatgggcagaaggagtcctcggatcagaacttcgactacatgttcaagattctcatcatcggcaacagcagcgtgggcaagacgtccttcctcttccgctatgctgacgactcgttcacgcctgccttcgtcagcaccgtgggcatcgacttcaaggtcaagaccatctatcgcaacgacaagaggatcaagctgcagatctgggacacagcagggcaagagcggtaccgggaccatcaccaccgcatactaccgggggcgccatgggtttcattcctnatgttttgacattcaccaacgagggattcctttcaatgncagttgcagggattggttccacccagtttcaagacntattcttgggggacatttgcccgggtgttggttggtagggaaacaagttttgacttgggagggttgagcgggtnggtgtcntcagaaacgttggccggcagttaggttggaccactttngggttngatttt

SEQ ID NO: 742 - DNA, 191 bp, Homo sapiens
tttttttttttttttttttttttcacagccaattttcacactgttgtttcacattctcacagccctcagcacaggtcacgtcccagcccagctctgggactttggttcagggctcagagcctctggtctgggctgatcgaaaacctcctttgaccctgtggcagtaggcggaccttggggaccttgggccc

SEQ ID NO: 743 - DNA, 459 bp, Homo sapiens
  misc_feature (1)..(459): "n" represents an unknown nucleotide
caaggcaggtctgnaggctctggaggagtttggagctggcctcagctctgtccgctttatctgtggaacccaagagcatccacaagaatctagaagcaaaaatagcccgcttccaccagcgggaggatgccatcctctatcccagctgttatgacgccaacgccggcctctttgagccctgctgaccccagagganacagctcttctcgngacgagctgaaccatgcctccatcatcgacggcatccggctgtgaaggcccacaagtaccgctatcgccacctggacatggccgacctagaagccaagcttgcaggaggcccaagaaagcatcnggcttgcgccttggttggccactggattgggggcctttttcccattgggattgggccgacattcggcaccccttgcaaggaagatcttgcttgccttcgccttctangatatggtngcccttggt

SEQ ID NO: 744 - DNA, 381 bp, Homo sapiens
acagagatggggaagaggaagaggaagaggaggagccattggatgaaagctcagtgaagaaaatgatcctcacatttgaaaagagatcatataaaaaccaagaattgcggattaagtttccagacaatccagagaagttcatggaatccgagctggacctaaatgacatcattcaggagatgcacgtggtggccaccatgccagacctgtaccaccttctggtggagctgaatgctgtacagtcgcttctcggcttgctcggacacgataatacagatgtgtccatagctgtggtcgatttgcttcaggaattaacagatatagacaccctccatgagagtgaagagggagcagaagtgctcatcgatgctctggtggatg

SEQ ID NO: 745 - DNA, 387 bp, Homo sapiens
accaaaactagctttaatttgtccaaaagccacacagagttgtgtagaaactgatccaaggagggaagctgagagagtccatgatgcgcagggccaaggtgcctctagaagttctccagcaagcccaggatgcgcttttgctcgttctcccggaactccgggctccggccgtccccgatgttctctgcatactccttgatgatatgcctgacaattttgatggagcttcctcgcatgtttaggatctggtgaaccctctggcgaatctgggggacattggcattgcagatctcggccatgatgtagcagatgtgctggagaacaaagagccccgcatccaggcgccggagtagaactcctcctcggtgtcattgtcgatgatctctc

SEQ ID NO: 746 - DNA, 468 bp, Homo sapiens
  misc_feature (1)..(468): "n" represents an unknown nucleotide
tgttagtattaatatcatctgctactccaccagcaagaagaggcaaactcattctctcactggataaacaatccaccttcaagtctgtcttatttacaacatgattttcttcaattaaatctggtaatccaggacactgagcatcttctatgctgctcctcgctttcaggaatactcaaaaacaaagtcttcttcacatgttcacttttcgtattctgaggaccggcattttctggtgatgtagtttgttgtggaatgcccatctcatttctactctgagatacagctttgttgacagacttaggtgttccaagtctttgagaagggccttcagaagagacagaaagtcctgagaataatttaacaggactttcaactctggaaaaatccagcatcgnacactattttatcaacttccnttgggtatcacagaaactggcggtttcagcacattcttcccggcccaat

SEQ ID NO: 747 - DNA, 399 bp, Homo sapiens
  misc_feature (1)..(399): "n" represents an unknown nucleotide
cctttgggtcctctaactgtttggcatgaagaacatgttttaaataaaaatgaagctactactaaaaatttaaatggccttccaataaaagaagtcccatcacttgaaagaaatgaaggtcgaattgctcagccccaccatggtgtgccatatttcagaaatatcctccagtcagaaactgagaaattaacttcacattgcttcgagtgggacaggaaacttgaattggacattccagatgatgctaaagatcttattcgcacagcagttggtcaaacaagactccttatgaaggaaaggtttaaacagtttgaaggactgggttgatgattgtgaatataaaccgagggtataaaggngactaccctgtacaggtctgggatggggttttgggggtat

SEQ ID NO: 748 - DNA, 472 bp, Homo sapiens
  misc_feature (1)..(472): "n" represents an unknown nucleotide
gacacttgaaatcatttattcaaggcatttttataggtagctggggtttacactgacctttaggatatagtttccaggttttacatctgtaatatcaatccactggcagtctatgtctgcaccataggtatcataacagccaggactcaatccctgtgtgtgtgcagtacatgcaaatcgcctgtggtagccatagtcacaggatgtgtcttcaagacagaaacttgctttgtggccttcagccactctcctctgggtgttggcatcaagcaggtcatagtggctaaactcatccatactgtggtaatgttgatgacaactgtgccattcccaggaatatcttggtccggctgggtaagaaatctgatgtcccttgggtttttcactcttttgggggaaatctgagcagcaccctgtgatcataatctctgacatctgccctgtatgctgtactggccagacanctcgtgcc

SEQ ID NO: 749 - DNA, 441 bp, Homo sapiens
  misc_feature (1)..(441): "n" represents an unknown nucleotide
tgtctggccagtacagcatacagggcagatgtcagagattatgatcacagggtgctgctcagatttccccaaagagtgaaaaaccaagggacatcagatttcttacccagccgaccaagatattcctgggaatggcacagttgtcatcaacattaccacagtatggatgagtttagccactatgacctgcttgatgccaacacccagaggagagtggctgaaggcnaacagcaagtttctgtcttgaagacacatcctgtgactatggctaccacaggcgatttgcatgtactgcacacacacagggattgagtcctggctgttatgatacctatggtgcagacatagactgccagtggattgatattacagatgtaaaacctggaaactatatcctaaaggtcagtgtaaaccccagctacctataaaaatgccttgaat

SEQ ID NO: 750 - DNA, 479 bp, Homo sapiens
  misc_feature (1)..(479): "n" represents an unknown nucleotide
attccagcctgcactttttatttgtaggcagaaggaacgggataggttgaggggcatgatgggggctctcgccacctcttgtctgcacctctggaacaggtggtagccgaatcattcaagtcctacctggtcagactcccaaccacgctgaggcaggcccttacctggatggcctcatgggctccctcttgaaaagaccctcactctgtttggaaaagatcccttagcagccataatcaggaaagagactctagagcgagcccagggttccccaaagcggattttctgtcctgttttcagctggaaattgaagtccttngggggcctcgaagatgagcacgatggtggagcccaggttgaactcgcccaggtgctcgcccttacgcatggggacgccctctctattggtgtgcgtcacgaagctgaagtcattgtaggagcccttgctgtgccttgggctgtttgtgtgcangtcccgg

SEQ ID NO: 751 - DNA, 447 bp, Homo sapiens
  misc_feature (1)..(447): "n" represents an unknown nucleotide
cgcatctactttgaccgggacctgcacacaaacagcccaaggacagcaagggctcctacaatgacttcagcttcgtgacgcacaccaatagagagggcgtccccatgcgtaagggcgagcacctgggcgagttcaacctgggctccaccatcgtgctcatcttcgaggcccccaaggacttcaatttccagctgaaaacaggacagaaaatccgctttggggaagccctgggctcngctctagagtctctttcctgattatggctgctaagggatcttttccaaacagagtgangggtcttttcaagagggaggcccatgaggcactccaggtaagggcctgcctcagcgtggttgggagtctgaccaggtaaggacttgaattgattcggctacccacctgttccagaggtgcagacaagaggtggcgagancccaatcatgcccc

SEQ ID NO: 752 - DNA, 547 bp, Homo sapiens
  misc_feature (1)..(547): "n" represents an unknown nucleotide
ccttttaaaaaaaaaacttttattttaggttcagggatacatgtataggtttgttataaagataaactcgtgttattctgaaaagacttccatttgcagacatcgctgctgcccagaactccctgccaccagccatggccaaccccactgtgttcttcaacattgcaattgatagtgagtccttgggctgcatctccttcaagctatttgcagacaaagttctaaagatggaagaaaatttttgtgctctgaacactggagagaaagtatttggtgataaaggtccctgcttttacagaattattccggggtgtgtgtcagggtggtgacttcacacaccataatggcactggtggcaagtccctctacagcaaggaatttgatgatgagaacttcatcctaagcatacagctcctggcgtcttgtccacggcaaatgctggacccaccacaaatgggtcccagtttttcatctgtactgccnagacagaggatgggatgacagcatgtgggcctttggcnaggtgaaagatggcatgcctcgtgcc

SEQ ID NO: 753 - DNA, 485 bp, Homo sapiens
  misc_feature (1)..(485): "n" represents an unknown nucleotide
catgccatctttcaccttgccaaagaccacatgctgtcatccatcctctgtcttggcagtacagatgaaaaactgggaaccatttgtggtgggtccagcatttgccgtggacaagacgccaggagctgtatgcttaggatgaagttctcatcatcaaattccttgctgtagagggacttgccaccagtgccattatggtgtgtgaagtcaccaccctgacacacaccccggaataattctgtaaaagcagggacctttatcaccaaatactttctctccagtgttcagagcacaaaaattttcttccatctttagaactttgtctgcaaatagcttgaaggaagatgcagcccaaggactcactatcaattgcaatgttgaagaacacagtgggggttggccatggctgggtggcaggaagttttgggcagaagcaatttntgcaaatggaagcctttccgaatacacgngttttncttattaca

SEQ ID NO: 754 - DNA, 362 bp, Homo sapiens
tcaatttttattatgaatgtccaaagtgacagcatactgtgaaaatgctaagttctcattgattaaatttcaagagaccacagactacagcattccaagcactttaatttttgacagagccaaaaacaaataaaagaatgataaaaatattcttttgggtgtaaagagtattcatatttgagtttttgtatttttttcttccctgcaggtattgtgaacactgataatttccaaaacataaattctggtctggatacttgcagcaaatttttataatctctacctggataagaagctaataagaaatgtacttataaagtatgtttacgatacagtgtgatatgtttgtttatcttcatttc

SEQ ID NO: 755 - DNA, 475 bp, Homo sapiens
atctgtagctcatccagtaccagtgatggaaaggacagatggcaaggaaaccctttcgcggggaaaaagaaagtcatattgtgttggacctacagattactagaaacatagctttagtaaaccaaggctttttttcttgaacacaatctgtgtagactgtgtagttcttgattggtggctttaatccattatcattaggtatctccttgaacgttctcaaacactgaaagtcttaagctttcattaaaaaaaaaagagtaaatgcagctttcagaaaatccaggattctgtacagtcttcgagtgtttcacttcagcctccctgtcctgttattaccaacagcaggtacccgggtggtagacaagaagcctcatgggatagataaggaaatgaagataaacaaacatatcacactgtatcgtaaacatactttataagtacatttcttattagcttcttatccaggtagagatta

SEQ ID NO: 756 - DNA, 214 bp, Homo sapiens
ccagagaattgtaaaatttattgtataagtattgcagcttttcagaatgtcatcattgccactaatgattactgatacacaacaagcagtttcttcaggcctgtggattggcatccaaatacagagtcttacgcagcggggacgtgggtgcgcgccccgatgccacggaaagcttacataagtttaacttgaacagagcttgggaaatggggct

SEQ ID NO: 757 - DNA, 230 bp, Homo sapiens
gttggttcctggcgtgggaactgctctcctttgcagccccatttcccaagctctgttcaagttaaacttatgtaagctttccgtggcatgcggggcgcgcacccacgtccccgtgcgtaagactctgtatttggatgccaatcacaggcctgaagaaactgcttgttgtgtatcagtaatcattagtggcaatgatgacattctgaaaagctgcaatacttatacaataa

SEQ ID NO: 758 - DNA, 467 bp, Homo sapiens
  misc_feature (1)..(467): "n" represents an unknown nucleotide
tgcttaaataataatgcttttattattgtaaaaaacaaagcaatgtgagacaagcagttcccaagttggtgacttagaggctggaaaaaaatccatggaggtgtcacatgaaaccagtatgtcttgaaaaagacagtccttcttggcaagctgccaacaacactcatattgggttctctggcacaaagctgggtcaagtccatgccctaacttgtcagagaggaagactcagactattcatgatttcttctagcaaatggggagaagcagaggtctgcttccttgagcaggttcaggaggtaaatgatacacacttgtgtgggacctcacaggtggtaagacatgatacggcttctgccttcagaaactgtcagttgacataaatggcaagagccnttaaatggcaggtgagaaagtctaacacctntcctaaatggcatgttagaaagtgtnacacataccctggg

SEQ ID NO: 759 - DNA, 362 bp, Homo sapiens
  misc_feature (1)..(362): "n" represents an unknown nucleotide
cagagtacctgatttggaagccccaacatctaaggatatacggtgggcggattccccttaagttccaggtatgtgttacactttctaacatgccatttagaaagtgttagactttctcacctgccatttatgntcttgccatttatgtcactgacagtttctgaggcagaagcgtnatcatgtctaccacctgtgaggtccacacagtgtgtatcatttacctcctgaacctgctcaaggaagcagacctctgcttctccccatttgctagaagaaatcatgaatagtctgagtcttcctctctgacaagttaagggcatggacttgacccagctttngtgccangagaaccccaatattga

SEQ ID NO: 760 - DNA, 116 bp, Homo sapiens
ttttggcatttaaagtttaattactaactgtataatgcctgagaacaaaattcagagcaattctcaaaagggttaagagtcagactctgggcattttcgttttttagctgcaggct

SEQ ID NO: 761 - DNA, 340 bp, Homo sapiens
  misc_feature (1)..(340): "n" represents an unknown nucleotide
ttttccagacacggtactgtattttccgcaaaagaaaattaacatttagtaacacactaatgaattttatctccaaagagattagtgcactggcaaagtattcggattacagtggagagctgtgaacagcagataccgaaaacaccccagcctggcagatcccaaggtaacgatggccttcactgaccactccctttgccagaggtccagaaagaacttgcagcatgatcacctgcctgctgcacttccaactctaagcagcaaacttcaaggagccaaagaggagtccccagtggcaaggggagcagagaagagaancgtgggtaaatgtaaacctaaa

SEQ ID NO: 762 - DNA, 557 bp, Homo sapiens
  misc_feature (1)..(557): "n" represents an unknown nucleotide
agttaggagcttttaccttgtagcngacagtattaacatctagttggttcacctggaaaacagagaggctgaccgtggggctcaccatgcggatngggtcacactgaatgctggagagatgttatgtaatatgctgaggtggcgacctcagtggagaaatgtaaagactgaattgaattttaagctaatgtgaaatcagagaatgttgtaataagtaaatgccttaanagtatttaaaatatgcttccacatttcaaaatataaaatgtaacatgacaagagattttgcgtttgacattgtgtctgggaaggaagggccagaccttggaacctttggaacctgctgtcaacaggtcttacagggctgcttgaaccctcataggcctaggctttnggtctnaaaggaacatttaaaaagttgccctgtaaagttatttgggtgtcattgaccaattgcatcccagctaaaaagcaagaggcatcgttgcctggataatagagggatgtgtttcagccctgagatgttacagttnaagagcttgggntttcaatgagcn

SEQ ID NO: 763 - DNA, 313 bp, Homo sapiens
  misc_feature (1)..(313): "n" represents an unknown nucleotide
accagggatcattttcatcatcctcattagactcatctaaaaatgggttgaaatcgtcatcatctccagaactcatgtttttagagctctcatagtcactttcttcattatcagaggcatcagattcacttccactgtcgtcagaactgctaccagtaaggccacctacttttcgtgcttttttggcttctccgagttatttcttcacctaccctccgccacaaacaagagagtcagcccaaattcaatgtttcttaagatccagtacatcacatttagttcatgaattaattcanattgaaaaggtggcaga

SEQ ID NO: 764 - DNA, 323 bp, Homo sapiens
  misc_feature (1)..(323): "n" represents an unknown nucleotide
ttttttttttttttttttttttttttttttcctgcctcccaccgctttatttctttcggtttcggatgcaaaacaaaaaattttaaaagaaaatgtgacttcaaaggaaaagaacaaatttccaaagacttgggggagtgaaggcagagctggtagcagatggacgaggtctgcagacggagggcanaggtggtggaaggggccagggctgnnaggctccccctggaactgggactggtctcggtctgctgacgtcagggtcagctcccccgcggactgactttcagnagcccacagctgtggggctttcagcagccacacca

SEQ ID NO: 765 - DNA, 258 bp, Homo sapiens
  misc_feature (1)..(258): "n" represents an unknown nucleotide
caaacgtatcgagagctgggctgggctgggctggtgtggctgctgaancccacagctgtggcttgctgaagtcagctccgcgggggactgancctgacgtcagcagaccgagaccagtcccagttccagggggaggcctgcagcccatggcccattccaccacctctgccctccgtctgcagacctcgtccatctgcaccaggctctgcttcactcccccaagtctttgnaaaaatgttcttttcctttgaagtcaca

SEQ ID NO: 766 - DNA, 338 bp, Homo sapiens
ttttcaagtaaactttttaattgaagtataacacacatacagaaaagtacacaagtggtaagtatagagtttgatgaatgtttacaaagtgaacacacccatataagtatcaccaagatcaagaaataaatcatgacgtttggagttttaaaaagtacacttcggtcttaatggcttcatttcagcccctttcaggcgagttttctacatgtgctaactcatttccacaaaatagataaaatataaccaccagtgcttgtaatcaaagagtaagtcaaagcataaattcagccctctaaataacgaattaaatgcagaaaccttttggttttcatgac

SEQ ID NO: 767 - DNA, 406 bp, Homo sapiens
  misc_feature (1)..(406): "n" represents an unknown nucleotide
gaatgaggaagggaaccagtttgtggcctatttcctgcctgtagaagagacgttgaagaaacgaaagcgggaccaggaggaggagatggactatgcaccagatgatgtgtatgactacaaaattgctcgggagtacaactggaacgtgaagaacaaagctagcaagggctatgaggaaaactacttcttcatcttccgagagggtgacggggtttactacaatgagttggaaaccagggtccgccttagtaagcgccgggccaaggctggggttcagtcaggcaccaacgccctgcttgtggtcaaacatcgggacatnaatgagaaggaactggaagctcaggaaacacggaaggcccagctagaaaaccacgaaccggaggaggaagagggaagccctcgtgcc

SEQ ID NO: 768 - DNA, 113 bp, Homo sapiens
  misc_feature (1)..(113): "n" represents an unknown nucleotide
gcttccctcttcctcctccggttcgtggttttctagctgggccttccgtgtttcctgagcttccagttccttctcattcatgtcccgatgtttgaccacaagcagggcgtntg

SEQ ID NO: 769 - DNA, 326 bp, Homo sapiens
ttttcacagaaaaagaacatccaactttattcttaaatgtgtctcaagttaaaaatggcagaatgaatagcccttagttagcacacactatttttaaaagggacacttgtagaatttcactggttttttgttgttgtccttgttgttgttttccccgcttcttttcataggtgttgacgtatttgttttctaatgataatcttaagagttgactcttctaaaatggtgctcagatgttctgatatattcaggcctttcttaaacaacttactctgcattaaaaagtcatcaataagaactgtaattcagtgtttttaaaaatgaaa

SEQ ID NO: 770 - DNA, 354 bp, Homo sapiens
cctcgtgcgtgctccagttatgggaacgtcttcccttgggagaaaaaaacacaactgattgacactcagaactcttagctgtggaagaacatcatgcctatttataaccactgaatgcactgactttcaaaaactgaggtggggtgtgtgttacgaatgggctttttaacacttttagagtgttgctttagaactaccatcttcatatacaggagaaaggaagcatttaaatttttatagtgattatagagaatgattatatgatgtttgtaatgaataaaatagtagtttcattatttggcacaatagcagtttattttaaacaaacaatttgaagttaaacatttcattttt

SEQ ID NO: 771 - DNA, 455 bp, Homo sapiens
cttcatcaatatttattgggcgcctattatgtgcaaggccttacactaggcgctggggaagatacaaagataaatctgacagactgccctcaaagagcttacagtctagtataggagcatacagtctctggagaagatattttaagtgtaactaacctcccccatcccacccccacaaaaaaaaagaaaaaacctactagacttggtttcttccatttacttttagtttagcagcttcacgtaaaaagcataaatctgaaagtcttttaaaatgcatacttttactggtaaacaaaattcattttcattagaaaaaatgctgaatatttattgcaattaagaaaaatcttcagccgggcacggtgggctcacacctgttatcctaacactttgggaggccgaggcaggtggatcacttgaggtcaggagtttgagaccagcctggccaacataag

SEQ ID NO: 772 - DNA, 368 bp, Homo sapiens
  misc_feature (1)..(368): "n" represents an unknown nucleotide
gcaacgttgataaaatttatctgttcagcaaagagantgaacaaaaaagcacgttagtaatatgaagacaggaaaacgaatgaaagtctaacacataactcatattgatttactttatttctgttagattttacactctgaaaatttcacctcatttagtttgtacaaatactagacatggaaacttaaaatgtgcaggtgtcaaagcttaaaaatcaggtgtgtcctctttaaaggcatgtgcgataagcctgcagtcttaaccagacctggtaccagtttaacagttcattatacttctgtgatgagtggatctgttagtctggtagagattaatgttgaaatttacttgaattacagttattttg

SEQ ID NO: 773 - DNA, 526 bp, Homo sapiens
  misc_feature (1)..(526): "n" represents an unknown nucleotide
atggtttgggcatggcatccaatcaggcttcagtcttggtttatgttgtgagttaataaaaatgcatacagcttcatataaacagggccttcttatattttcttttatttaccaactatagacacaaagtcaagggcttattttcaatccattttattgatttattttatttctctgttttcctcttcatgtattcaaccattttttaggctccaacttttgagtgtggaaccatgccagcattagagatgcaaaggtgaccaagatgggcattccttgcctacagaatgtagtctaaatagggagatgcagaccaacttgcaactacaaaacagtgtgttaagtggtaggtgagcaaggagacgggtatctaaccccaaattaagcggcttaataaagtaattctggaaaaagctacagtcctggaggatgattaagaggctgctgggggtcgcagtgtgagggagtgtggcagggtagaaagagggccaagggatanttgagaccagtggntcccaaagagggt

SEQ ID NO: 774 - DNA, 418 bp, Homo sapiens
  misc_feature (1)..(418): "n" represents an unknown nucleotide
agcccagaatgtccttaacattttctgaaattcctgcttgaggacagagctaccctcttttgagaaccactggtctcaaatatccctttgccctctttctaccctgccacactccctcacactgcgaccccagcagcctcttaatcatcctccaggactgtagctttttcagaattactttattaagccgctaatttggggttagatacccgtctccttgctcacctaccacttaacacactgttttgtagttgcaagttggtctgcatctccctatttagactacattctgtaggcaaggaatgcccatcttggtcacctttgcatctctaatgctggcatggtttccacactcaaaagttgggagcctaaaaaatggttggaattacnggaagagggaaaacagnggaaataaaat

SEQ ID NO: 775 - DNA, 246 bp, Homo sapiens
  misc_feature (1)..(246): "n" represents an unknown nucleotide
caaatcctatgactcttctacttctcaaggtgtgtggtcttccactggcttgagtcatctcttcccaggaaagggtggtgccgtccagccagcacatccccagtggtgttactggatgcagcagnacttggatgtagttgcaccccctgggctggggtttccccccggctgatttcctgcggctgctgcaatggaaacaggaaaaagaacacaccaggtgacaagaggctgcagtggggcttcccc

SEQ ID NO: 776 - DNA, 560 bp, Homo sapiens
  misc_feature (1)..(560): "n" represents an unknown nucleotide
tgtatattcctttttaatattttttttcacttgtgttgatcatttgccttaaattaactttctactttgtttaaaacatggagaattagcaagctgccaggaggccaggcagggaaaccaggatgtttccatttaccttgttgctccatatcctgtccctggaggtggagagctttcagttcatatggaccagacatcaccaagcttttttgctgtgagtcccggagcgtgcagttcagtgatcgtacaggtgcatcgtgcacataagcctcgttatcccatgtgtcgaagaagataggttctgaaatgtggagcacatgttgtttaggtataaaatcagaagggcaggcctcgtgaagcgaggcggcaaaatttgatttcttggaggacacctgagcatataccggtcaaagtctgatgacaacaccagtagggatgaagctgggaattggggtggctaagaacactggacctgacactattagacatgggtccagcttcaggtctattactgntcactgtggccggcaacagngctacttaggnaaaatggtgatggt

SEQ ID NO: 777 - DNA, 533 bp, Homo sapiens
  misc_feature (1)..(533): "n" represents an unknown nucleotide
cagccaatcattcattgctcaagtgtctgaagcagccatggagaagtacctgagctcgccagtgaaatgatggcttattacagtggcaatgaggatgacttgttctttgaagctgatggccctaaacagatgaagtgctccttccaggacctggacctctgccctcctggatggcggcatccagctacgaatctccgaccaccactacagcaagggcttcaggcaggccgcgtcagttgttgtggccaatggncaagcctgaggaagaatgctggtttccctgcccacagaccttccaagangaaatgacctgngcaacttnctttcccttcatcttttgnagaaaggtangttagccaaagagcaaggcaagtagattcttccactttggtgtccctccttgggaaggtcattaaaggcccccagccaaacttcaattttcccccagaagccaaaagncccctttaaaggggtagaaagggccaagcngggaagaccaaacaaaagaaaggctggaaaaccaaagcaagtca

SEQ ID NO: 778 - DNA, 422 bp, Homo sapiens
ttttttttttttaacaaggagtttagttttattttctctgtgcatttgcaaaatactcaggaccaacataaaaaagaaatacctcctgtggaaaaagttacattaaaaaggggaatggagtgggggtgctgaaagggattagtacctttgccccaaggagctacagcatctctgattggtccaaggaatagaaaagatattgggaaaatgtaacaggaggaaggaaaatgtgaatttactgagggagagggcctcgaagtgggcctcgagggggaactggtggccggggagtgggtctgggtggagggagaggcccccgctggtagccatagggtgggggtcgtggagggccagtgtatccatgggggggcatcagtggaggaggtccacgctaccatgcgaggcataggacctgggtgacc

SEQ ID NO: 779 - DNA, 171 bp, Homo sapiens
  misc_feature (1)..(171): "n" represents an unknown nucleotide
atagtttgtcgttcttttaataaacacacttgcatagttatattacaattttgtaaaaataaaaacagattatctcatgccaagcgtgcccagcatttgcacaatctcaatacctttaatactataattttcaagacacacaaaattaaattttaaggcaaaaacngcact

SEQ ID NO: 780 - DNA, 558 bp, Homo sapiens
tgtttttctgttttttgataattgggaatgctgaaacctcttgcgtctgcgattcataactactcagacttgtcttatattacaaaaatgggggttaaggagaagtgtttatgtgggtttaagataatacagctgttaaggaagtggtctcttgttttaatgaagcaatgtggcaacttggacccttttacatctgtcccatgtgattcgatgcgtctcccattccagggtgtgggccggccaaggagagagggggaggctctgaggacaccttctcttcctcccttcttttcagacacgcagctttcggattcagattcctttctcggacttgctgctccagactgaggatgacggccaccgcctggtggaggatcaggagcttggtctggggcttgtcactcttgaggtggagctgcaccatgcggccgagctctttgaaagcctcgttgatgtcacggacccgcagacgctctcgggcattgttggccatcctccgctccttctcacgctctgccttctgctctggtgtcaggtcctcatcgtcattattgctag

SEQ ID NO: 781 - DNA, 393 bp, Homo sapiens
tttttttcaggtagtgttttggtttattatcttagtgttgtcacagtgatagaaacccccagagtgggaagaagagctcctgcagggacctacattttgccattcccctctgccctggggctcagagccttgaagcctttgcttggcccttgcatgttaggatatggccaagaatcagaaactgatgcgtttttccagcactacctgtgtgctgcactcatggaaggtgggaagctatacacaggtatccaacttggttataagacaccagttcccacagggctggatttctcagctgtctggtaaaccagtggcacttcactgccccagggtggctggctccctttctgaatttctgtctcaatgtgatataattgccaccattcaggatgg

SEQ ID NO: 782 - DNA, 419 bp, Homo sapiens
agaagtcatggtgttcataccagatgtgggtagccatcctgaatggtggcaattatatcacattgagacagaaattcagaaagggagccagccaccctggggcagtgaagtgccactggtttaccagacagctgagaaatccagccctgtggaactggtgtcttataaccaagttggatacctgtgtatagcttcccaccttccatgagtgcagcacacaggtagtgctggaaaaacgcatcagtttctgattcttggccatatcctaacatgcaagggccaagcaaaggcttcaaggctctgagccccagggcagaggggaatggcaaaatgtaggtcctcgcaggagctcttcttcccactctgggggtttctatcactgtgacaacactaagataataaaccaaaacactacctga

SEQ ID NO: 783 - DNA, 548 bp, Homo sapiens
  misc_feature (1)..(548): "n" represents an unknown nucleotide
ttttttttttttttttttagtaaaatccattgtagttgcatctggattgaagagctttaatcaaaaagtgtattgcaccacagatgaatttgctacagcagttttcaagaatacaatccctatttacaacatggaaggagagctcaagatccatcgctcgtataaagggctatagataccgtcgctaacacagaaagttttatacaagtcaaagtgcattaaatcacttaggaatatttattccactcttcctcttaaagctgaagggnaattcaacatgcagggagggaaagcctaggtcagtggaagcctccctaaagntgaggtacaggacctagggaacggggccccacaggcttacaccctgaaactgccnagggagtgggggtccnggggggtgccgtgttgggggccngtttcaatggggcttgggagaagnccccggggggcagcnggacggggnttttttttggggantttaggcttgccttttgggttggncttttgagcttnccccgtttttaggggtttttttcccgggggggccc

SEQ ID NO: 784 - DNA, 495 bp, Homo sapiens
  misc_feature (1)..(495): "n" represents an unknown nucleotide
aaatacactcaattgcctttttaatgaatgtacttgtcttggataggttgctggtaaaccattttaaactattttttatagctgaagttcttcactactataaacatgtcttctgtactataaattccatttaactggtgttcttaaaatcagagcgtccagaggaaattcttcctaaaactaggattcctgttcctttgtcttctcactcgcactctgggcactgctccctctgaagtgcagtgggatctcgtgtgctttgtcttgattctgtgctgcgctgccgctgggcgatgcaggaccacctgtcttctactgaagggacagtccgctgtctccagtggggggcagcagctgtcccccagcctcgatgggagacanggggggcagtctggcnttgtctgtngggagctgcttctctcttccctcatcccaaccccaaatatttaaaatggacattaacaaccagacgggggccagttgggtggcagnatt

SEQ ID NO: 785 - DNA, 424 bp, Homo sapiens
aagaagtaagcctttatttcctgtgttttgctattgaaactggttaagttggttgcaatcctactattcaagtacaaatgctgatgtttacaaagtatttacaattttagtcttgttcctttctatcttaaaacacaacagctaactggttacaacagttaacaaaataataataataaaggtcacaaaaagagaaacccctgtcttatcaggcaccaaatctgaacaagggcttggatccaaccttctgcttcccgccaggtgctttaaaaacagtctggctaactgtttttatcatcagaataaacgtctttctttaaagaatagcagggcaactgtttcccagggtcgccaattagagtctgacagtgttcgggctgctgctttatagtctgtgttctcaaagtttccaactcttacttgc

SEQ ID NO: 786 - DNA, 547 bp, Homo sapiens
tttaaagaaaatacagtgaagacactaagcaaacactggtccaatgggggctctcctcacttcccgagatggtcaaatggcacacttgtctgtgaggctgggatccgggagacctcttgccgcccagtgaggtctgaggaggagacgttggcgggcgcacccctgtgcagcctcatactcaccttcctctcccggtcgacccgcgagatcgctctgggagaagtattgccagccggctggatgcgggaggctggcgtggaagccacgggctcggcggcactgcggaccggttggcagtggccccgtgagtgggcgagggggcagggctcgggtcgcggaccccgtagctgccccatcctctcctcgcgttcgtgttctcgccgctcccggtccacatcctcgggaattcgggctgcaacgaatttcagcatgttccagtcaaagagtagtataggagaagccctgccgtggaagaagttgccgagagctgacgtaggtaagaataatcgggcatgtcatcaaaacgcacgaggcggaaaaaatgtaa

SEQ ID NO: 787 - DNA, 475 bp, Homo sapiens
  misc_feature (1)..(475): "n" represents an unknown nucleotide
taacatttggagatattttatttctgtgataaggaaatctcacataaaagtctttatcatttcattaattcacaaaaagtgttaaatcagttaaaattaaagagaaaagttcacaccgaatgaaagactcgttttgtcttctcttcccctgaagtaatttaaactcccaaagcagcacgagtttttgaaatcagtttttgtccctcttcagcaaagcagacttcctgttcctggggccttggcagccatttctccaacaggcctgaggaaatctggcaatgacagcctcaaggttgttccctctgttatttgtgggccttttgctttcacaagggttaatgagggaaacctcttgcttcatcgtttgcaggcggntacaccctgaggcttggggcacaggatccctttggggggaaaatggaaccttgtccatccgggggatgccggggnggggggccatatgggttttccatcc

SEQ ID NO: 788 - DNA, 387 bp, Homo sapiens
  misc_feature (1)..(387): "n" represents an unknown nucleotide
agatagcaagaaggcatcccttcctgtatgcacctacaattcttctttgggctgctcgctatgacaaaataattccatcttgctgcaaagtgaaaatgcagttgaatgcttccaaacaaaggcagcaacagttacaaaagaattaagagaaagcagcttgttaaatcaacatgcatgtgcagtaatgaaaaattttggggacccgaactttccaagccataactgttactaaactgagtcaggaagtttaccaaagttaattttactggaaatccaggaaactagtcctgggatgtgggcccatgttacatgaggcacttgtttgcagggggaggtgttgctgggatttgttcttgcagggatggggggggaaaaattccntgttcc

SEQ ID NO: 789 - DNA, 456 bp, Homo sapiens
  misc_feature (1)..(456): "n" represents an unknown nucleotide
gaggtataaaaaggaatatttatcttttaaaaatacaactttgaacactactggcatctcatttacaaagtatttttgtgaaatactctccattggctttgcttgctcagtacattcttttatcttcaattgagactcaagggagggtatgcttgcattattataaataccacaaccaccaccacacacaataaagaccatctctgcctcaggacattcgccccaaacctccatcctctctgtttactttccaccaagcagaagtttctgaatggtccactcacatgctgccattgcgatttgccgatgggacttaccaaggtgtctctggcaattcgnactccaggtggagctgacctatttgtaggaaagcctcacaaaccctaagctcattatttattcattgattcattactattaatacttatatcaagtctttgcaaacattcagcatgg

SEQ ID NO: 790 - DNA, 407 bp, Homo sapiens
  misc_feature (1)..(407): "n" represents an unknown nucleotide
aaaaagaaagaagctgaacttgaaaaactcaaagatgacaagttacaggtggaaaaaatgttggaaaatcttaaagaaaaggaaagctgtgcttctaggctgtgtgcctcaaaccaggatagcgaataccctcttgagaagaccatgaacagcagtcctatcaaatctgaacgtgaagcactgctagtggggattatctccacattccttcatgttcacccatttggagcaagcattgaatacatctgttcctacttgcaccgtcttgataataagatctgcaccagcgatgtggagtgtctcatgggtagactccagcataccttcaagccaggaaatgactggagttggagccagcctggaaaagagntggaaattctgtggcttcgagggcttgaagctgacct

SEQ ID NO: 791 - DNA, 562 bp, Homo sapiens
tattagttcttttacttttttcctcctatttttgccactcccatatacaccaatgtcggtccgggggctcagcacctgtaacaatgtatggctagaattcttcttaagaaacgtccgcccagtccgttctctccatgcccgtgctgctgctacctgtgattccacttgcggcagtgcttcaagacgcacaggaatagggcgtcctttcgcagacaagctctcaagctgctccaaataagcgtaattgctgccactctgaatagcttccactttagcggtccattctcgagccttttgtaaggcttctttcaaggacaacacattgggtagaaaggctggaatgttcttggcttcattcacaatgctttctaaacttgccacactgtgcctcggtcttgcctgtaggcagaccttagccttttcttcccatcgttcagagactgtaaggagctcctgtagttcagccattgctttctccacagcatggtggggtggcaagctcaccccagagtctatcagcttctcatgacatccaaagtgacttggtgcggatctcgaaagg

SEQ ID NO: 792 - DNA, 578 bp, Homo sapiens
  misc_feature (1)..(578): "n" represents an unknown nucleotide
gtctggtacgactggagtaccggcagcgctgggatgaagcctttcgcaagttcctgaagggcctggcttcccgaaagccccttgtgctgtgtggagacctcaatgtggcacatgaagaaattgaccttcgcaaccccaaggggaacaaaaagaatgctggcttcacgccacaagagcgccaaggcttcggggaattactgcaggctgtgcactggctgacagctttaggcacctctaccccaacacaccctatgcctacaccttttggacttatatgatgaatgctcgatccaagaatgttggttggcgccttgattactttttgttgtcccactctctgttacctgcattgtgtgacagcaagatccgttccaaggccctcggcagtgatcactgtcctatcaccctatacctagcactgtgacaccacccctaaatcactttgagcctgggaaataagcccctcaactaccattccttctttaaacactcttcagagaaatctgcantctanttctcatgtataaactaggaatcctccaccaggctctgtgatagagtcttttagcccagatttt

SEQ ID NO: 793 - DNA, 532 bp, Homo sapiens
ggcagtgttcagcatgcagaaccacatgttttctctctgctctcacatgttcctgtaatcctgagcggcttgtatgtctctaccatccaactgatctgtgcccctgccccatgcagaagaaatgtcttagatatcgctacccattagaagacctcccttctctgctatatggtgtaaaagtcagggcacagtcctatgacacttgggtcagtcgtgttacagaagcattgtctgctaacttcaaccacaaaaaagatttgattgaattgcgagtaatgctggaagatgctgaggataggaaatacccagagaatgatctctttcgaaaactcagggatgctgtaaaagaagctgagacctgtgcttctgtggctcagctgcttctgagcaaaaagcagaaacacagacagagcccagatagtgggaggactcggaccaaactgacagtggaagaattgaaggcctttgtcaacaagcttttagtcttcgtgtgtatcagccagctcggcaagtaagatctgccagatgtgtg

SEQ ID NO: 794 - DNA, 1110 bp, Homo sapiens
gacagagcccgggccacggagctccttgccagctctcctcctcgcacagccgctcgaaccgcctgctgagccccatggcccgcgccacgctctccgccgcccccagcaatccccggctcctgcgggtggcgctgctgctcctgctcctggtggccgccagccggcgcgcagcaggagcgcccctggccactgaactgcgctgccagtgcttgcagaccctgcagggaattcacctcaagaacatccaaagtgtgaaggtgaagtcccccggaccccactgcgcccaaaccgaagtcatagccacactcaagaatgggcagaaagcttgtctcaaccccgcatcgcccatggttaagaaaatcatcgaaaagatgctgaaaaatggcaaatccaactgaccagaaggaaggaggaagcttattggtggctgttcctgaaggaggccctgccttacaggaacagaagaggaaagagagacacagctgcagaggccacctggcttgcgcctaatgtgtttgagcatacttaggagaagtcttctatttatttatttatttatttatttgtttgttttagaagattctatgttaatattttatgtgtaaaataaggttatgattgaatctacttgcacactctcccattatatttattgtttattttaggtcaaacccaagttagttcaatcctgattcatatttaatttgaagatagaaggtttgcagatattctctagtcatttgttaatatttcttcgtgatgacatatcacatgtcagccactgtgatagaggctgaggaatccaagaaaatggccagtaagatcaatgtgacggcagggaaatgtatgtgtgtctattttgtaactgtaaagatgaatgtcagttgttatttattgaaatgatttcacagtgtgtggtcaacatttctcatgttgaagctttaagaactaaaatgttctaaatatcccttggcattttatgtctttcttgtaagatactgccttgtttaatgttaattatgcagtgtttccctctgtgttagagcagagaggtttcgatatttattgatgttttcacaaagaacaggaaaataaaatatttaaaaatat

SEQ ID NO: 795 - DNA, 376 bp, Homo sapiens
ctataagtgctttatttttatattctctatgaaaacatcaataattaagcccctttgttctaagccagaaacactataaaactaccattaaacaaggcagtatcttgacaagaaagacataaaatgtccaagggatatttagaacattttagttcttaaagtttcaacatgagaaatgttgaccacacactgtgaaatcatttcaataaataacaactgacattcatctaaacagttacaaaacagatgtgcacatacattcccctgccttcacaatgatctcattggccatttgcttcggatccgccagcctctatcacagtggctggcatgttgcaggctcctcagaaatattaacataatgactggagaacat

SEQ ID NO: 796 - DNA, 475 bp, Homo sapiens
  misc_feature (1)..(475): "n" represents an unknown nucleotide
gattcggcacgngggaggaagctcactggtggctgttcctgaaggaggccctgccttataggaacagaagaggaaagagagacacagctgcagaggccacctggattgtgcctaatgtgtttgagcatcgcttaggagaagtcttctatttatttatttattcattagttttgaagattctatgttaatattttaggtgtaaaataattaagggtatgattaactctacctgcacactgtcctattatattcattctttttgaaatgtcaaccccaagttagttcaatctggattcatatttaatttgaaggtagaatgttttcaaatgttctccagtcattatgttaatatttctgaggagcctgcaacatgccagccactgtgatagaggctggcggatccaagcaaatggccaatgagatcattgtgaaggcaggggaatgtatgtgcacatctgttttgtaactggtttaa

SEQ ID NO: 797 - DNA, 2301 bp, Homo sapiens
agcagagcggacgggcgcgcgggaggcgcgcagagctttcgggctgcaggcgctcgctgccgctggggaattgggctgtgggcgaggcggtccgggctggcctttatcgctcgctgggcccatcgtttgaaactttatcagcgagtcgccactcgtcgcaggaccgagcggggggcgggggcgcggcgaggcggcggccgtgacgaggcgctcccggagctgagcgcttctgctctgggcacgcatggcgcccgcacacggagtctgacctgatgcagacgcaagggggttaatatgaacgcccctctcggtggaatctggctctggctccctctgctcttgacctggctcacccccgaggtcaactcttcatggtggtacatgagagctacaggtggctcctccagggtgatgtgcgataatgtgccaggcctggtgagcagccagcggcagctgtgtcaccgacatccagatgtgatgcgtgccattagccagggcgtggccgagtggacagcagaatgccagcaccagttccgccagcaccgctggaattgcaacaccctggacagggatcacagcctttttggcagggtcctactccgaagtagtcgggaatctgcctttgtttatgccatctcctcagctggagttgtatttgccatcaccagggcctgtagccaaggagaagtaaaatcctgttcctgtgatccaaagaagatgggaagcgccaaggacagcaaaggcatttttgattggggtggctgcagtgataacattgactatgggatcaaatttgcccgcgcatttgtggatgcaaaggaaaggaaaggaaaggatgccagagccctgatgaatcttcacaacaacagagctggcaggaaggctgtaaagcggttcttgaaacaagagtgcaagtgccacggggtgagcggctcatgtactctcaggacatgctggctggccatggccgacttcaggaaaacgggcgattatctctggaggaagtacaatggggccatccaggtggtcatgaaccaggatggcacaggtttcactgtggctaacgagaggtttaagaagccaacgaaaaatgacctcgtgtattttgagaattctccagactactgtatcagggaccgagaggcaggctccctgggtacagcaggccgtgtgtgcaacctgacttcccggggcatggacagctgtgaagtcatgtgctgtgggagaggctacgacacctcccatgtcacccggatgaccaagtgtgggtgtaagttccactggtgctgcgccgtgcgctgtcaggactgcctggaagctctggatgtgcacacatgcaaggcccccaagaacgctgactggacaaccgctacatgaccccagcaggcgtcaccatccaccttcccttctacaaggactccattggatctgcaagaacactggacctttgggttctttctggggggatatttcctaaggcatgtggcctttatctcaacggaagccccctcttcctccctgggggccccaggatggggggccacacgctgcacctaaagcctaccctattctatccatctcctggtgttctgcagtcatctcccctcctggcgagttctctttggaaatagcatgacaggctgttcagccgggagggtggtgggcccagaccactgtctccacccaccttgacgtttcttctttctagagcagttggccaagcagaaaaaaaagtgtctcaaaggagctttctcaatgtcttcccacaaatggtcccaattaagaaattccatacttctctcagatggaacagtaaagaaagcagaatcaactgcccctgacttaactttaacttttgaaaagaccaagacttttgtctgtacaagtggttttacagctaccacccttagggtaattggtaattacctggagaagaatggctttcaatacccttttaagtttaaaatgtgtatttttcaaggcatttattgccatattaaaatctgatgtaacaaggtggggacgtgtgtcctttggtactatggtgtgttgtatctttgtaagagcaaaagcctcagaaagggattgctttgcattactgtccccttgatataaaaaatctttagggaatgagagttccttctcacttagaatctgaagggaattaaaaagaagatgaatggtctggcaatattctgtaactattgggtgaatatggtggaaaataatttagtggatggaatatcagaagtatatctgtacagatcaagaaaaaaaggaagaataaaattcctatatcat

SEQ ID NO: 798 - DNA, 605 bp, Homo sapiens
  misc_feature (1)..(605): "n" represents an unknown nucleotide
ttattctccctttttttctgatctgtacagatatacttctgatattccatccactaaattattttccaccatattcacccaatagttacagaatattgccagnaccattcatcttctttttaattcccttcagattctaagtgagaaggaactctcattccctaaagattttttatatcaaggggacagtaatgcaaagcaatccctttctgagggcttttgctcttacaaagatacaacacaccatagtaccaaaggacacacgtccccaccttgttacatcagattttaatatgggcaataaatgccttgaaaaatacacattttaaacttaaaagggtattgaaagccattcttctccggggaattaccnattacccctagggggggtgctgtaaaaccacttgatcaggcaaaaggcttgggcttttcaaaagttaaaggtnaggcaggggcagttgatntgcttctttctgtnccatctgagngagttgggnttctnatgggcccttgtgggngcattgggagcnctttgngccctttttctctngcactncttggaggngccgcangtggtggcagtgctggcncacctccgntgcact

SEQ ID NO: 799 - DNA, 418 bp, Homo sapiens
  misc_feature (1)..(418): "n" represents an unknown nucleotide
gacaagnaacactggnacctttgggttnctttnctggggggnatatttncctaaggncatgtggncctttatgctcaacggnaagaccccctcttcctccctgggggaccccaggatggggtngccacacgnctgncacctaaagcctaccctattctatccatctcctggtgttctgcagttcatctcccctcctggngagttctctttggnaaatagcatgacagggctgttcagccgggnnggtggtgggcccagaccactgtctccacccaccttgacgtttcttctttctagagcagttggccaagcagaaaaaaaagtgtctcaaaggagctttctcaatgtcttcccacaaatggtcccaattaagaaattccatacttctctcagatgggaacagtaaagaaagcagaat

SEQ ID NO: 800 - DNA, 381 bp, Homo sapiens
tagtacaaaaataaacagacatttatttccagacttatcttttacataagttaaatacacatttgtctgaggcactgaaacattcgcatacacaacccaaattcccaggttttgtcagcagatcaatgttaataacaaatcaagttttttttttaaaaaaaacagtgaacagtgttttatacaagcatattgactatttctttcttaaccttaaacattctaaacgtaaaattgtaaagaagattctcctgagttatctttaatgatatttatttcattttctccctcttcccaaaagaaaatttttttcaattatttatataaatactattatctgtaatcagcgtttgatttaaaaatattaaaacccacagtgcttga

SEQ ID NO: 801 - DNA, 287 bp, Homo sapiens
  misc_feature (1)..(287): "n" represents an unknown nucleotide
ggtggtgctcatcttccgctcgtttaatttcagtcagatattaaacatttacaatttttttatataacaaaacaagaacatgcaaagttacaaatatagaaaatataangtacatgcatatttcaaagacctgttaatnggtgtccactttggattcttacatgaaacgattcagtgcacattgtaagcctaaggaccacgcaaaagggtttcccacatattaagtattcagtaccttacaaaacgttaattgcaattacgacacttcagatgttaactgctctaaa

SEQ ID NO: 802 - DNA, 444 bp, Homo sapiens
aacaaatctcagaacagtctgaaatacctttgcctggatacctctggctccttcagcagctagagctcagtatactaatgccctatcttagtagagatttcatagctatttagagatattttccattttaagaaaacccgacaacatttctgccaggtttgttaggaggccacatgatacttattcaaaaaaatcctagagattcttagctcttgggatgcaggctcagccgctggagcatgagctctgtgtgtaccgagaactggggtgatgttttacttttcacagtatgggctacacagcagctgttcaacaagagtaaatattgtcacaacactgaacctctggctagaggacatattcacagtgaacataactgtaacatatatgaaaggcttctgggacttgaaatcaaatgtttgggaatggtgcccttggaggcaa

SEQ ID NO: 803 - DNA, 484 bp, Homo sapiens
  misc_feature (1)..(484): "n" represents an unknown nucleotide
gcgnccgccatgccgtncacccgcaagccagggctggagctggtcaacagccgcttcacccagcccaccccggagacctggtctatgtggaccccagccccgactactgcctgcgcaacgagagcacgggctccctgggcacgcaggccgccctctgcaacaagacctcggagggcatggatggctgtgagctcatgtgctgcgggcgtggctacaaccagttcaagagcgtgcaggtggagcgctgccactgcaagttccactgggtgctgcttcgtcaaggtgtaagaagtgcacggagatcgtggaccagtacatctgtaaatagccccggaggttgcttcccnggccccccttgaactcttgcctncacaaaaggtccatattattataaatcnatattaaacccatttttaaaatttggtataagntaaatgggttggggtgctatacaattggaaagatggaaattggaaaggaagag

SEQ ID NO: 804 - DNA, 590 bp, Homo sapiens
  misc_feature (1)..(590): "n" represents an unknown nucleotide
ctggacaagaccctgaagacatcgaggttgaagctgagttcccgccaccttcatagggcctcttggctacgtggcagcgatcacaggcagtcctctaaccaacaaagactctagacttccagacaagatcatctcctccatccaaccacaacctccctcctccaggcccgtggtggacagacagtaaatatttccaagtccctacatcctgagagtcctcaccagagggagagaaaaagccctgtctcccacccaccaagaggagagaaccagcaaagtccactcctcagagatctccagcgtctcttaaataagctcttcctttccattttcatctttccattgtatagcacccacccatttacttatacaaatataaaanagatttatatagatttatataatatagacctttgtgaggcagagtgcaggggggccgggagcaggcctccggntaatttacagatgtactggtccacgatctccgtgcacttcttacacctgacgaagcagcaccagtngaacttgcagtggnagcgttccacctgnaggtcttgaatgggttgtagcangccggaggaaatgaggtt

SEQ ID NO: 805 - DNA, 466 bp, Homo sapiens
  misc_feature (1)..(466): "n" represents an unknown nucleotide
gcccctatccgctcagcccgtgcgccctcctcccccaccccattctaccatgggaagttcttggggggaggccaaagtcccttctagaggtggcttcacccttttcccaggaacagtccagtttcaagaagaaggagcaagcagcagactggctggaagtgtcagggtgttggtcagccggtggctgngcactgccaganantgaaaggagatggtctgaggaaaccccagcctcaggttaggaaagaggggcacaggttcttgttggcatgagtgtcaactcagtgcaaaggactgtcctaatctggaaacctgaaagctgtcatctcacagatgtagggaagagacttctacatgactctgactccagtgttcaccatgaacaagttttatgtaccttgttagcatttgagacttgagcataaggtctagtggcgtgtgtatcatccgtcaactacaatccttg

SEQ ID NO: 806 - DNA, 375 bp, Homo sapiens
ttttgtgggaaagctgtttactgcgttctcccgctgtgtgtaattgggttcagtgtggctgaaacacagctttgccccaggctttggcacttccagccccaggagaggcgctgaaccccagcaaaggaatgtgttccctgtgggcagccggtgcccctggtcactgcagttgcccaaagctgatatttccctgggatccagctggagatgttgagctgggaagccctgttggtcacgcctaactccggaggcagtaagaaggtaaaagttccaagtttctccgggcctttaagcagggttaggtccaacagggttaagcatcccgggacttaagcctgagggggcccaggagttcaaagggagagttcaaggttc

SEQ ID NO: 807 - DNA, 559 bp, Homo sapiens
tttcgctacaaatcaaaaggctttattccttatataaacccacacttagaaaaaataaatagttaataaattataggcaaaccagttggtctcagccacgcctcccactgaggtccagggcagccgctgcagcagcagaggagcgggaaggtgtagccacagcttggctcaagggcgtggtctggactggggacgaagggacagaggaggaaggcaaggtctgggtgagggcagggatgggggctaaaggtgggttcctgaggcgtgcccaggctctggcccgggcagcaggggtgaggcaggggctcagctcctcctgggcctgggcgatgcggcgtgcgaacgggctgcgatcccgagcaagctgctcccaggggccctggcgggcgggcttgggcggccctgcccagacagccaggaaatggacaagtgagcttctcggagaagcgcacctttctggctttaggggagtctcagggtccgatcatgaataaggggttctgggggctttaacctcgttgcgcaattttgggctcagggggcaattcccccaaggggg

SEQ ID NO: 808 - DNA, 363 bp, Homo sapiens
ctcaagcgcccagaaacccctactcatgatccggaccctgagactcccctaaaggccagaaaggtgcgcttctccgagaaggtcactgtccatttcctggctgtctgggcagggccggcccaggccgcccgccagcgccctgggagcagcttgctcgggatcgcagccgcttcgcacgccgcatcgcccaggcccaggaggagctgagcccctgcctcacccctgctgcccgggccagagcctgggcacgcctcaggaacccacctttagcccccatccctgccctcacccagaccttgccttccatcctctgtcccttcgtccccagtccagaccacgcccttgagccaagctgtggctaca

SEQ ID NO: 809 - DNA, 366 bp, Homo sapiens
tttttttttttttttaaggttctcaagaattttattataaaacagaacaatgacacaatataagcttacacattaatatttacattatattcaaaatatattacagctttaatttatgaacagaaatatcctgtcttttcttctttttcttttctgttttctttgcatcattgatttgcatttttacttgatcttgtaatttagaaaagaatgcttgagaggactttaaggccttgtctttacctttatcctttatgaaggaagctttgccagttttggtcagctgttttaacttctccgaagctactgttttgctgtatttccctgcttgatctacactgctcttttcaagcagttttctccgct

SEQ ID NO: 810 - DNA, 403 bp, Homo sapiens
gaatccacaaaacaagcaggttgcagacctactggagataaaggaaaacatcaaaattatagagaaagaatggacactgaaatagaattcggtatatttttttttaaagaacaaatgtatcttctagaaatgagatatatggtaattaaagatgaaaacgcaaatatgaagcaaaagtattttagacccagttcaataaaatactgaactggaagagaaatctaaggacattttcacaatgaagtatagtgaaataaatatatggcaaatatgaaagggtggtttagaaataatgatggaggagaattgcttgaacccagaaaggggaggttgcagtgagccaaggttgtgccagtgtgctccagcgtgggcagcctgggcaacagagcgacactctgtcaaa

SEQ ID NO: 811 - DNA, 482 bp, Homo sapiens
  misc_feature (1)..(482): "n" represents an unknown nucleotide.
gccacggagcgantaannttgtgaaagctcgtggggtgaggaggggatggggcaggctctaggaggctgagtcggaggcctctgagctgtccttgacatctgtgctctctgtggtctcgctgacctcgctgaggtccttgctgtccccaccactatcctcggcagccaggcccttctcctcgcgacaggcctctcctgagctcggaggtnaattgcctttgctctccaccttgttctcgatggcacccagnaccacgtcctgcccttctctttnagctccagggtgccgcctcagctcgtcggccatctgagtgaggtcccgcttcatgggcataggngtcctccccatctgcatagtattttggggctccacttcactgatctgaaagttgagggtttttggaataagagggtgcagggnggcccgttaanttttncccgaaaagcaggggagacaattttgggcattnaaagntcttnaa

SEQ ID NO: 812 - DNA, 370 bp, Homo sapiens
  misc_feature (1)..(370): "n" represents an unknown nucleotide.
gcccagcgagcccagctccggtcccagccccggccgtcccgngttcgcttcggngcgcggcgcantgaactgcgccttcacgatccgctgggacccgcgagccccgccgccgttatgaacatccgcaatgcgaggccagaggacctaatgaacatgcagcactgcaacctanctctgcctgcccgagaactaccagatgaaatactacttctaccatggcctttcctggccccagctctcttacattgctgaggacgagaatgggaagattgtggggtatgtcctgggccaaaatgggaagaggacccagatngatgtngccccatgggacatatcaccttcattgggttgtgaagcgtttccccaccgg

SEQ ID NO: 813 - DNA, 459 bp, Homo sapiens
  misc_feature (1)..(459): "n" represents an unknown nucleotide.
atatttccaattaaagctttatctttcagagcatgttctatttctttctcttcaatcttgaaaaacacctttgtcaaacgggtttccttgtttctctttaatcctaaaatgcccctggcttccaagagccctgaaagtgacaaacactctgactggtccacagccgccacctgctgtttgcgacagactttactgtaggcttcatataacttccccagagtgacctctttgattttcaactgcctgatcaagagcatcaaagagcaaaccaagatcttctgctgaagagggaaggaatcttgtgctccttcttgggctcaaggtcatcctgttaacatcaatttctgaggatgacttggggatatgtggaataaggnccaaccctcttggggaatcagggggttcaggaaggnggtttacattcaggncagtggntttgaggaatagtctgggctttgg

SEQ ID NO: 814 - DNA, 456 bp, Homo sapiens
  misc_feature (1)..(456): "n" represents an unknown nucleotide.
aaaaggaagctgtctcgggcattgaacaaagctaaaaactccagtgatgccaaactagaaccaacaaatgtccaaaccgtaacctgttctcctcgtgtaaaagccctgcctctcagccccagganacgtctgggcgatgacaacctatgcaacactccccatttacctccttgttctccaccaaagcaaggcaagaaagagaatggtccccctcactcacatacacttaagggacgaagattggtatttgacaatcagctgacaattaagtctcctagcaaaagagaactagccaaagttcaccaaaacaaaatactttctttcagttaggaaaaagtcaagggnttcacaacaaatttttgaggcaggggtgtccactgaagganaggantctggctgcgtggggantatttcaaggcaagaagggcatttgctaccngcaggcaaagttggtnc

SEQ ID NO: 815 - DNA, 170 bp, Homo sapiens
ttttttttttttttttttttttttttttttttttttttttcacaggctgaaggagttttatttcaaatggttgcctgatgcctgtggttagggggggccgttcccgtggtgagcggggtacacatggacttgggaactggtagggggtgacagtctgaggcatggtcatg

SEQ ID NO: 816 - DNA, 535 bp, Homo sapiens
ggcacgaggcacagccagagctggaggtgggtgcccggcacgaggggcctgcggaccaatggctctgcctgcaccttagggctcgggatgctgctggccctgccagggctgtgggctcgggtggcagcgcggaggacagcgtgggctccagctctgtcaccgttgtcctgctgctgctgctgctcctactgctggccactggctagcactggcctggcgccgctcagccgtgactcagggggctactaccacccggcccgcctaggtgccgcgctgtggggccgcacgccggcctgcgtctgggccagccccccaggtcgctggctgcaggcccgagctgagctggggtccacagacaatgaccttgagcgacaggaggatgagcaggacacagactatgaccacgtcgcggatggtggcctgcaggctgaccctggggaaggcgagcagcaatgtggagaggcgtccagcccagagcaggtccccgtgcgggctgaggaagccagagacagtgacacggagggcgacctggtcc

SEQ ID NO: 817 - DNA, 433 bp, Homo sapiens
ttttttaactcatgtggttaacatggtattgtataaaaagaaaaaaaaaacaccactcaatacttactaagccttgcagacagctcagagttgaggcagcatattgggcatagagatcataggatttgtattatcccttgcaagatggaactccaaccaacaccagaattttccaattcaaattcagttttagtcgagaccccagcataatttttagaaaaaagattggattgttgcttttcttttaattttccattcctatttagacaaatgaccagaggcaatgacaaaagtaactgtttaaaagggatttctctccagaagttttttctaaaggtttaagtccaggctttccatccttctctccatcctttttcattttaaaaagaagggttttggaatatgtcaacctttactcagcttgctatacaaa

SEQ ID NO: 818 - DNA, 360 bp, Homo sapiens
ttttttttttttttttttttttttttttttttttttttttttttttttttttttttttttttttttttttttttttttggggggggttttttttttaaaaaaaacccccaaaaaagggaaaataaacgggacccaaaaaaaaaccccccagggggccccgggatttaaaggggggccccccaaacccccccccccaggtcaaaaaaaaattttcaaccaaagggggttcctaaaaaaaaaaaaaaacccgggggggccaaaaaaccccttaaaaaatcaaaacccaggggcaccaaaaaaaaaaaccgggggggggcccccccacggaaaaagggccttggggggggaaccccaaaaaaa

SEQ ID NO: 819 - DNA, 281 bp, Homo sapiens
caaaatgcaaagtattgaaggcactaacaataacaaggcaggacaaagggtaggcaagtgggggcacggagatccagcacagaggtaactcaacggcccacctgctcacggcccagcctggagaaaaagaaaagctacagggccaggtctgaaggcagtcagggcggctactctacagaagataaaaatcctttctacagaggatcaggaaggcaggagcacacggcagcaaggggcaggctggaggtcacgagttagtggctcttctcagcagcgaggac

SEQ ID NO: 820 - DNA, 501 bp, Homo sapiens
taatattcacatctgtttaatgtgcataaagccaaggaaaggacagttccgaattcaatagaaatattctgtacaattcatatggtggggttgtttgggagggggacaaggctgtagaacccacacccgaacatgtacaaaaataacttatacagcaacccccacctgcaaggatgatgcagctctgcccagccaccggggctggagggcacactgcagacatggcaccgcgggagccgaccagtatgggccccagatgcaggtgggagtgaggagggcaccagtccggatgtgagggcagctattaggaggccttgagacggttgctggccgagcgtgactcaggcagctttgtccaccatagtgcgggcgtacggaaccgggctggccagctccttgcagcagccgtactcctccaggagactcaggcggtattgtgcggaagtcccgcttctcggcgatgtaagtcacggctggcatcaatgggcaccaaatgggctt

SEQ ID NO: 821 - DNA, 425 bp, Homo sapiens
tcgaggtggatgtgtggtccattgggtgtatcatgtataccttgttagtgggcaaaccaccttttgagacttcttgcctaaaagagacctacctccggatcaagaagaatgaatacagtattcccaagcgcatcaaccccgtggccgcctccctcatccagaagatgcttcagacagatcccactgcccgcccaaccattaacgagctgcttaatgacgagttctttacttctggctatatccctgcccgtctccccatcaactgcctgaccattccaccaaggttttcgattgctcccagcagcctggaccccagcaaccggaagcccctcacagtcctcaataaaggcttggagaaccccctgcctgagcgttcccgggaaaaagaagaaccagtggttcgagagacaggtgaggtggtcgag

SEQ ID NO: 822 - DNA, 3693 bp, Homo sapiens
aactgtagtgcattttgccttctttccttcttagagtcacctctactttcctgctaccgctgcctgtgagctgaaggggctgaaccatacactcctttttctacaaccagcttgcattttttctgcccacaatgagcggggtaagatttttatttttggcaaggggtataatttgggttcactgtggctacttgaacactacactgcagctaactctatctttgtttcctttccaggaatcaatgaatttcagcgatgttttcgactccagtgaagattattttgtgtcagtcaatacttcatattactcagttgattctgagatgttactgtgctccttgcaggaggtcaggcagttctccaggctatttgtaccgattgcctactccttgatctgtgtctttggcctcctggggaatattctggtggtgatcacctttgctttttataagaaggccaggtctatgacagacgtctatctcttgaacatggccattgcagacatcctctttgttcttactctcccattctgggcagtgagtcatgccactggtgcgtgggttttcagcaatgccacgtgcaagttgctaaaaggcatctatgccatcaactttaactgcgggatgctgctcctgacttgcattagcatggaccggtacatcgccattgtacaggcgactaagtcattccggctccgatccagaacactaccgcgcagcaaaatcatctgccttgttgtgtgggggctgtcagtcatcatctccagctcaacttttgtcttcaaccaaaaatacaacacccaaggcagcgatgtctgtgaacccaagtaccagactgtctcggagcccatcaggtggaagctgctgatgttggggcttgagctactctttggtttctttatccctttgatgttcatgatattttgttacacgttcattgtcaaaaccttggtgcaagctcagaattctaaaaggcacaaagccatccgtgtaatcatagctgtggtgcttgtgtttctggcttgtcagattcctcataacatggtcctgcttgtgacggctgcaaatttgggtaaaatgaaccgatcctgccagagcgaaaagctaattggctatacgaaaactgtcacagaagtcctggctttcctgcactgctgcctgaaccctgtgctctacgcttttattgggcagaagttcagaaactactttctgaagatcttgaaggacctgtggtgtgtgagaaggaagtacaagtcctcaggcttctcctgtgccgggaggtactcagaaaacatttctcggcagaccagtgagaccgcagataacgacaatgcgtcgtccttcactatgtgatagaaagctgagtctccctaaggcatgtgtgaaacatactcatagatgttatgcaaaaaaaagtctatggccaggtatgcatggaaaatgtgggaattaagcaaaatcaagcaagcctctctcctgcgggacttaacgtgctcatgggctgtgtgatctcttcagggtggggtggtctctgataggtagcattttccagcactttgcaaggaatgttttgtagctctagggtatatatccgcctggcatttcacaaaacagcctttgggaaatgctgaattaaagtgaattgttgacaaatgtaaacattttcagaaatattcatgaagcggtcacagatcacagtgtcttttggttacagcacaaaatgatggcagtggtttgaaaaactaaaacagaaaaaaaaatggaagccaacacatcactcattttaggcaaatgtttaaacatttttatctatcagaatgtttattgttgctggttataagcagcaggattggccggctagtgtttcctctcatttccctttgatacagtcaacaagcctgaccctgtaaaatggaggtggaaagacaagctcaagtgttcacaacctggaagtgcttcggaaagaaggggacaatggcagaacaggtgttggtgacaattgtcaccaattggataaagcagctcaggttgtagtgggccattaggaaactgtcggtttgctttgatttccctgggagctgttctctgtcgtgagtgtctcttgtctaaacgtccattaagctgagagtgctatgaagacaggatctagaataatcttgctcacagctgtgctctgagtgcctagcggagttccagcaaacaaaatggactcaagagagatttgattaatgaatcgtaatgaagttggggtttattgtacagtttaaaatgttagatgtttttaattttttaaataaatggaatacttttttttttttttaaagaaagcaactttactgagacaatgtagaaagaagttttgttccgtttctttaatgtggttgaagagcaatgtgtggctgaagacttttgttatgaggagctgcagattagctaggggacagctggaattatgctggcttctgataattattttaaaggggtctgaaatttgtgatggaatcagattttaacagctctcttcaatgacatagaaagttcatggaactcatgtttttaaagggctatgtaaatatatgaacattagaaaaatagcaacttgtgttacaaaaatacaaacacatgttaggaaggtactgtcatgggctaggcatggtggctcacacctgtaatcccagcattttgggaagctaagatgggtggatcacttgaggtcaggagtttgagaccagcctggccaacatggcgaaacccctctctactaaaaatacaaaaatttgccaggcgtggtggcgggtgcctgtaatcccagctacttgggaggctgaggcaagagaatcgcttgaacccaggaggcagaggttgcagtgagccgagatcgtgccattgcactccagcctgggtgacaaagcgagactccatctcaaaaaaaaaaaaaaaaaaaaaaggaaagaactgtcatgtaaacataccgacatgtttaaacctgacaatggtgttatttgaaactttatattgttcttgtaagctttaactatatctctctttaaaatgcaaaataatgtcttaagattcaaagtctgtatttttaaagcatggctttggctttgcaaaataaaaaatgtgttttgtacatgaagtaggaatcgtatttcagcttcaaggttcagattgaggggcccactgtttggagaggatggtattcaggctttctcatgtccttcaaatctgttagcgtttgactctagaaatcaaagcaaaggagtggttacccagacacttcttttggtgtgatcaatgcgctgatgtgatctatgaagatgattcatgcttgaaaactagcacagaaacatcttgcttatttgccaaagctgggagatgagcttctctgcataatttaaatgttcagataaatgaagctgacttatttaagcaataaccttttaaacattttagctaagatgtataaaaatgtttccaaaatataccacatactttatttcttcttaaatgtagtacattaggttacatcatttttcttgctgtcttgggcatcaaaacaggtgccatggtaacctgacactctcaggagacattaagatagaaggggctgttcttcagtggttcccattgattctccccatatctttttgctctcaggctctggccgtctcttcctgagccttaactgtgt
